United States Patent Application Publication US 2026/0248139 A1, published August 27, 2026 (application 19/345,401).

The application's sequence listing, which the Patent Office published only in electronic form, follows.

SEQUENCE LISTING (41 sequences)

SEQ ID NO: 1 - DNA, 41231 bp, unidentified
  source 1..41231: mol_type = unassigned DNA
  misc_feature 1..41231: note = the genomic sequence of a bacteriophage
ttatcgaagattcttgaagaacacaaagtgtggattacctctatgcgtgcgacctgatctggtgccaacctgtacggtgccgacctgtacggtgccaacctgcgcggtgccgacctgcgcgatgccgacctgcctgatctcactttcgtaattctgggtgagaaatacttcataagtataacgaacggtgaatatgtacgagcaggatgccagaaccacacagttgaggaatggagaaaatatagtaagcaggaaattgctgagatggatggtcgtaaagctcttaaattttatccacgtcttctggacattatcgatttctatattggtaaaggtgaacgcccggattggttaacaagtaaagaatatgcagatgaagtaactgagtaagcgtatttttggcagcgagacacagaggtgaatatgaaaaagtttaaaggtacgccaggtccttggagcggaaaggatgtacgcatttgcaggcaagatagagctgggttgcagcttggttttatcatgacccatgacgaaaatcgcgtagctgaatgtgaggccaatgcacacttgatagcagcatctcctgatttgctcgaggctcttcaattggctgaaaaagcgatggcagaaggacgcaatgtgacttatccggagtggtacggggtaatcaataaagctcgcgcagccatcagcaaggctcttggggaggagtgatggaaataaataaagagcaggcatcagaaattataaaacttatcgaacaagcattacttgatgggtttgatgatgaaattctggtttcgctacacgaaagtcttaccaaatttgtcagcgaataagcacctaatgaccattttaatagtggtcattgtgagcaatatcgctcgtaaccaaacgaggacgacgactcgttctggttaatcgaaaaatcatcccttgatgttatttgccgctctatatgggcggcattctttttacctgggggaaatatgaaattacgtgtctggcatatcccgcaagttcctatgaagccattcattgtagaagtagcaagtgttgaagagggtgtgcgagtgatggatgcactggctgattatgacgcatttcagtatgacaacaacatcaaacctgattactgcaacgctaacggccttgagatgtgggatgagagccttactgaccaggatttggaagaaatggagcttacggatcgctgggtggattggtatagcgaatgccagtgttacgacgacccgcgtgaatatatcgaaagcctgaaagaagaaacaacaacagccgcctgagtgcggctgttttatcgcatatccacagcgcttcatatcgaggcgttttagctatgccaataaatgaaaatggagagtcccacgatgacatttgctatcgcgggcggtgccgtcatgggtatcgcccaacttaatgaatcacttttagagcgtatcaccagaaaattacgggccggatggaaacgtctcggtgaaattcttaatcagccaggagtaccacgccatgaccattacgcctgttaacggaacaattcttgttcagcaaggaaacagggagttcaacaagctatatgagaaagtatttccggatacaaaacagggaatgtctgatgcgtatacatgggctgcaggaatagctcttggttgggataagtggcaggacgaagaatgggaggcgcgtcatgttgcatgattttgatgataacgagtttattgccctcattcctcctgaaattgaggaagaagtggagcagcaaattaacttagccgcagaacggcagaatccgattattagctgggatgaatttgcggggtattactcatgaatctggatctgttagatgaaccgttcgctgctgaagatattgagtggcgaatacagcaaagcgggaaaacacgcgatgggaagttatgggctatggtgctggcttatgtcacgaacagggcaatcatgaaacgcctggacgatgtttgcggaaaggccggatggcgcaatgaatatcgcgatattccaaacaatggcggcgttgaatgcggaatatcaatcaagattgattccgaatgggtaactaaatgggatgccgctgaaaacacgcaggtagaagccgtcaaaggcggtcgttcaggagcaatgaagcgcgcagccgttcagtggggaataggacggtatctgtataatcttgaggaaggatttgcgcagatatccagagataagaaacaaggatggcacagggcaaaactgaaggatggaacaggattttactggctccctccatcgctgccggactgggccatgccagcatcatgcaatcaaccatcaccagaaaataccaaccagaaatctccatcggttgactgcgaacaaatcctgaaagacttcagcgattatgcagcaacagaaactgacaagaaaaagctaattgagagatatcagcatgactggcaattattggctggtcacgatgatgcgcagacaaaatgcgttcaggtaatgaatatcagaataaatgagcttaaacaggtggcttaatgagaagattaaacataactccagctgagatggagtcagtttgcggtcgcatggtagcttgccgtgcagcagaacatctgggcctaaacataaatcagttttattacatagcaaaaaaactgtcattaaaaacggcattcgttaagccaagatggagcgacgacgaagacaaaagaatgcagacgcttatctcatcaggctatacacaaagaaatgtagcaaaaattctcgggcgaagtgaagagtcggtaaaaagcaggctatcacgtttacgaaagaaataaccctatacgtaccacattattcggataacctaccctggagtaaattatgcctgcacctctatatggtgcggatgacccgcgcaactgctccggtagctccaagtcggaggtgctggaaaatatcaaaaacaatctcgacgcgtttcttgctctgccaccggaaacaaaagcagaacggaagtaccgacgcgatatacaactcgcagaaaaacaggaaaaagaccgaataaacgaaacagcaatccgaccattccgaaaagccacttacaccaaattcattgaaatagacccgcgccttaaaaattaccgttcgcgttacggcgctatcagcaataactgagggattcatcatgagaggtttgtcctacgaccaaggaatccttccatcggaaatgattattcgacaccgcttcaagcccatcaacgatattccacgcgaagaaatgctggcgagaaagagttttccatcagtgaatcaaaacaaatatctgaatgcgatgtggcggagtgggaagaaatgaaacaaatgacactaattgagatggatggatttctgaaaggtaaatgcatcccacgagatttaaaggttaacgaaacaaacgctgaatatctggtgcgtaaatttgctgaagcggaggccaagatttccgcgctggccgaagaccaccagagagcgattgagtcaattaagcaggctgattcggctgttaagttggcacacgagaagttttcggcgctggcttcggagaatgcggcactgaaaaaatcagaggtcgaattcaacgaatattgtcgtcgcgagtgcgaggacgttggagatacgtgggtggacgatttcactgataccccagccaccgacgctttcctggatgaagtgcgtgcgcaggcgtttaatgacctttgctcggcgttcgttaaggacgctacggttgtcgggctggacgatggcgacatcgttacggtgaaagaagcgacggacgccctgctgcattgtgcagaccaacttcgcaagggagtgcattcatgaccaacctactaccatgtccattctgtggcggcgcggcgcacgttgccagcgaagcagatcaccctgaatatggctctggcggtcgattctatttcgttcgatgcggtacgtgtcgcgctcaatctggtagcaaatatgcggcgcctggaaatgactgcgcgattttttattcagaggttagagcagagtggaatcagcgagcaaaggaggcaaccagtgagcaagattgactatcaggcactgcgtgaaaaggcagagaaagcaacgtgtggtgtgtggtcgctcgaatatggagaggagagatttgatgctggtgatgcgctaattcatcgtgaagttgttggatatcttcccatttgcagaattgaaggagcgcatcctgaaagcggtttcgatgaagatttccaaatggaacagcaggccaatgctgaattcatcgctgcagccaatccggctactgtgctggcactgctggatgaacgggaaagaaaccagcaatacatcaaacgccgcgaccaggagaacgaggatattgcgcttacggtaggtaagctgcgctttgagcttgaagcagcaaaaaagcgcatagcggaactggaagccgaacccgtaagccaaacttacaagttgaacgagctatcgggcagctatccggcaactccggatggttggataagctgtagtgagcgaatgccaaacgaagaagatgttttggtttattgttcagacacaaaagagcagatggtagggtttcacaaaggtaaagggttatttcaattcttttacatgaacggtgttgagggggtatgtgagccgtcacactggatgccgctaccggagccaccgcaggaggtgaagtgatggaccccttcgcgaaatatacgattattgactggatagccttccttcaggttttgctcatctggttttatatggcttacaggagtggacagtggattgtcagtgtagcctgtagcaagggatggcgttggtggaaccgaaagaataaaaaagcactggcattggattcgttttacgaagcattcaatcttaacagccttcagcctggttctgtcgttgtagtcaccactcaaagcggcatgacgatacaaattcacaagccaaaggaggaaggtcgtggctaacctgcaacttgccgtcaaaggtgaatacttcgatgccatgattcgcggagagaaaacggaagagtatcgcctgtgtaatgactactggaataagcgaattatgttccgggagtatgaccgcctgattatcacaaagggatatccgaagcgcgacgattccagccgcagaattgacgtcccgtatgacggatatgaaatcaagacaatcacacatccgcacttcggcgataaaccggtaaaggtgttcgcgataaagatgaatatcggcaatgaataacaatcctcgcactcgcggggatttcttttatctgagctcgctacggcgagttttgttttatggagtgaatgatgattcttgtgatcagtgccacctatctttgtcgccgcggggatattgatggcgcggtttacgcaggtatagcaatttttggatttattgagcttcttgtagagattgctcttctcgcttcagtattaggaaagtaactatggaatcacacagcctcacactcgatgaggcctgtgcatttctcaagatatccagacctaccgctacaaactggattcgcacaggccgccttcaggcaacacgcaaagacccttccaaacctaaatccccttacctcaccacacgacaagcctgcgttgcggcacttcaatctccgctgcatactgtccaggtgagcgcgggtgatgacataacagaggaactgaaatgtcactattccgcagaggtgaaacctggtacgccagtttcacattgccgaacggcaaaagatttaagcagtctcttgggacaaaggacaaaaggcaggccacagagcttcatgacaaactgaaggcagaagcatggagggtaaataaattaggagagacgcctgacatgacttttgaggaggcctgtgtcaggtggttagaggagaaggcgcataagaagtcgctggatgatgacaagagtcggataggattctggctccagcattttgcagggatgcagttgaaggatattaccgagacgaagatttactccgccatccagaagatgactaatcggcggcatgaggaaaactggaagttaatggatgaagcttgcaggaagaatgggaagcagcctccagtattcaagcctaagccggcagcagtagccacaaaagcaactcacctttcattcattaaggcactcctccgggctgctgaacgcgaatggaagatgctggataaggctccgatcatcaaagttcctcagccgaaaaataagcgtatccgctggcttgagcctcacgaggcaaaaaggttgattgatgaatgcccggaaccgctaaagtcagtcgtagagtttgcgctttctactggcttaaggcggtctaacattatcaatatggattggcagcagatagacatgcagcgaaaggtggcatggatacacccggaacaaagtaagtccaatcaggccattggcgtggcgctgaatgatactgcttgccgggtgctgaaaaagcaaataggcaatcatcacaaatgggtgttcgtctacaaggaaagcagcaccaagccagacggaactaaatcacctgtagtgaggaagatgcgctatgacgctaatactgcatggaggtcagcattaaaacgagcaggcattgaagacttccgttttcatgacctgaggcacacgtgggcaagctggttagttcaggctggcgttccgatttcggtattgcaggaaatgggtggctgggagtctatcgaaatggttcgcagatatgctcatctggcaccaaatcacctgactgaacatgctcgacaaattgactcgatttttggtacttctgtcccaaatatgtcccacagtaaaaataaggaaggcacgaataatacgtaagtatttgatttaactggtgccgataataggagtcgaacctacgaccttcgcattacgaattataagaactaccttttaagtcaacaacataccgcgtcatacctgcgctcacacgtcccatcttcgaaaaacatgcaaagccttgcaagccgatgcaaagctttgtgtgtcccgtttttgtcccaaaccacttagcaatcagcaataaaaattgatcggtaacaacgatcaattaacgagcaaacaataactttaaactatcaaagtttacattattgatcgtttatatcgatcaaagtaatttgtagtgctacactccagacctttccgaatccgctgattttcataatgttgaagttattcgctaagtacacatcgatcggtgttcttaacacgcttattcattggggcgtatttgctttttgtgtgtatgggatgcatacgcatcaggcgctggcgaacttttccggttttgttatcgccgtatcgttcagcttctatgccaatgcgcgtttcacctttaatgccaccaccaccacgcttcgctacatgatgtatgtgggattcatgggaacactgagcgctgttgttggctggatggctgaccaatgttccttgccaccattgattacccttatcactttctcggcaattagcctggtatgcggctttatctattccagattcattgttttcagggatataagatgaaaatctctcttgtcgttccagtttttaacgaagaagacacgataccgattttctataaaacggtacgtgagtttaatgagctaaaagaatatgaaattgagatcgtttttattaatgatggtagtaaagatgcgactgaatcaataattaacaaaatagccgcatctgatccgctcgttattccgctttcgtttacgcgaaacttcggtaaagaacctgctcttttcgcgggtctcgaccatgcaaccggagatgcggtcattcctattgatgtcgatttacaggatccgatagaagttatccctcatctcattgagaagtggcaggctggcgcggatatggtgctggctaagcgctcagaccgctcaactgatgggaggttgaagcgtaagacagctgagtggttttataagctgcacaataaaatcagcaatccaaaaatcgaagaaaatgttggcgactttcggttaatgagccgtgcggttgtcgagaacatcaaacaaatgccagaacgcaacttgtttatgaagggtgtgctcagttgggttggcggaaaaacggatgttgttaaatatgcccgtgccgaacgcgtggccggtgattcgaaattcaacggctggaaattatggaacctggcgctggagggaataacttctttctcaacatttccgctccgcatatggacttacattggattgtttattgcaggtatgtcattcctttacggtgcatggatgattattgataaattaatatttggaaataatgttcctggctacccgtctcttcttgtttctgttcttttcctgggtggcgttcaattgataggaataggtattcttggagaatatattggtagaatttacatagaaaccaaacagcggcctaaatacatattaaagcgtaagggttttaaaagtgaaatttaatagtaatgacaggatatttatatcaatctttcttggattggcgattatatatacatttcctttattgacacatcaatcatttttcgttgatgacttgggtaggtctttatatggcgggttgggttggtcaggcaatggtcgcccactttccgactttattttctatatcattaattttggaaccccaattatagatgcttctccgctacctttaatgctagggatagttattttagcattggcactatcctgcatcagggaaaagctgtttggagatgactacatcacagcatctctttgttttatgatgattttggcaaacccattctttattgaaaatctatcatatagatatgattcattaacaatgtgcatgagtgtggcaatatctattatctcatcgtatgtcgcttatcaatacaagcctataaatatcataatatcatccattttaaccattgcattccttagtctttatcaggctgcgctgaatacttacgcaatattcttgttggcctttataatttcagatgtggttaagaaaaactcaatttcaaatatcacaaaaaatacagcatcttctgtcgctggtttaatagtaggatattttgcctattcttactttattgcaaaaagacttgtaacaggttcttacaatatcgaacatagtaagattatagagataaactcaagtttatttgaagggataatttctaacgtcttatcattttatagaatgtttagcacgatcttgaatggcgataattacttaatctactactcgctattctttgcgctaatcatttctttgatagtcatagttttaaaagtaatcaaaagagatgaaaataagaaaacaaagttcttgctagtagttttaattttattggcatcaatgtttttcatcattggaccaatgatttttctaaaatcaccaatatacgcaccgagggtattgattggtatgggtggctttatgtttttttgttgcctatgcgtattctatgcttttgaagataagcagttaatatcaagaatatatttttcttttattcttttaatatcaacaatattttcttatggtgcttacaatgccataaatgcacagtttcagcttgaggaaagcattgtaaatagaatatctcaagacatagatcatcttggatttggaagagacaagaaaaatataaaattcattggcacagaaccgtatgcatcaataaatgaaaacatagtaataaagcatcctttaatgagagagttaataccacgcattattaacaataattggatgtggtcagaggtgttaatgcaaagaaatgtgttctccagaaattacagactatatgacaaagaggtgaaacttgaaaatgggtggaaaaaatctggtaataacgtatacgatattggtgttgtaggggaaaccatagttgttaggtttaattagctatagaacatttaccataaaataaaaatgggtgtttacacccatttttattacatatctaaagtgttgctaaggttaatctaactaattctccattgggttttttcactaaagcctttaaagaagtagaattattttcccaatatggcaaaaaacatgaggaatcctttataaaatcatctgacgcgatgtcagggacaaatggtatctctgcccccctgcaatctttgtggttaacttttaatgatacagcgtcaggtgtgttacctgaaatagcagtaagttgagtccacgctgagccagaaccgggccccccgttaatgtgggagtacaatgctccgctatctaaggtctttgataacttatgaatccgcagtttaatcgctgcgctatcatagccgaaactattagcgcggatattacctaacccttcttctgccaaattagcaacattaattctagaggggtctaccatcccggtgataccgcttacggtagagttaggggcgtctatggttagaccctgcccatcggttgagcggatcccaattaaacgtaaaccgttcacacggcaagccccagatatataaatctgattagcctggaaatccttagtattggtatcaattatggctatattggtaaatactgattcatgggtgagtaggtacgcgccagagccagcgcaatcttctacggtaatattagacacatacatgcccttaccatccataccaaaacctacacctaacgccccgcgaaccagaagattatcaatcaggtgatttaggggtaactgatgcagtgggtattgggttatagggtagtccccaggcctgtccaactccggattcatgtcagtgtcagcacctaaatcgaatccgtcccatacggggtaaataacgaccgagtcgcggaattgcagattatagttgcgagaggttgtcgagcccacagtaccttgccaagttttaacaccactctccccagcgcgatatgaagtaaacccaataactccaccatcacgttcaaagccaccattattacgtaaaaattgggcgctacttactgatccatagctggttcgtccgccaatgacatagttacccttaccccaatcgccgctaaggttttcgaaggttataatgccatctttacctccgcttggattattggcgtctaccatcttgcagaagtgacaccctctaaacaaaaaaccagccattagaccgctagcccgatgaacttcgacccctatacattctctaatttctaacgtagacgttatgttttgcccttttgcattaggtgggagtaacgtttctattcctgggaatttaacgtaatcgcttacggttggctgatacccatcggttttcgattgttttaaagtggcaacgaccgctgcggcatccgttagccactgattgtcatccgtccaaggcttgataacccatggtgttgtagtgctttccataaaaaccccggcaatgcgggaacctttgcctaatttcgtaaaaataagatttccatctcctataaacttagctttacattctatagtcagaaccttaccaccaaaatcaactttctctccattataaaaatgataatcaacatcgataagaaggccatcaaccgcagcagatgctgcatcctgcaatgttggataatctgataattttactgaatacttaaattttttatcagcttctattgaatattgatctggatcgtacttcaatacgttagcaatatagtcaacctgagaaccattggcatcatagatagccatgctatgaccctgaacggtgacaattttcaccagttggccgttgtatacgattttaccggctgcgttgataattagcggctgagcaatctggacgtgagagccatcctcattttcaatgtatacgggtatctgattggcaggattaacaggatcggtatcaatctgaccaatgtaaattttcccattcgcaacagctttaaacgaacgggattcagtgaagacgggacgagggttagaaacaactacgtttgcagtgatatctgtcatttaatgtgctccagatgaaagtaatcgtcgcagcgtggctacggcaatgcgtcattaagaccacggtggtcttattgtggatacaaccagtagatcatatgatgctgatccacttacaaaagtgaggcatcagaaatgggaagagatgacccgcaatttaacctcaggctaccctacgagctgaaagaaaaggttaagcagagggcaaaggcaaacggaaggtcactaaatgcagagctagtgcagatagtggctgattcacttgaaaagcctacgcctgtaatcggatacagggatgatgctgaacgcgaagcagacatcgtatccagagaaattcaagaattagtattcgaaaagttgaaagatttctatcgaaaaaaatagcccggcgaaccgggctttactcattttttgcaagctatatacatgcttcttgatatggtgtttgttgcaaatgcgttgccagtacttccgtcaatgtttgcaatagctccctgatcactaccagtgctaatcaggtcatagccttttgaaccacaaagatctccggccttggcctgacacatagcccatgaaccacctactccagagcattctatggtatatgcctctcttccatctggagcatacgtttttgttgctgtagcgcacccagcgagaaatacacaaaaacagccaaccatcacaccttttttcattatcatcacccaattaagtaagggattcagataatatatagatcaaagaatgatctctattggttcctacgaggatttatgaacagagacttattgaactttgcattccttatcttcggcatcgtagttggtagactgctattcgcttaatgcatctgatttagcaccttgagcaacagagttaacagcccgctcaacttcggctaacgctttctcgaatgcggtagaaccacgtggagtattagccaggcgaagcattgcattacgtgctggttcactctcatacattcttgccagcaaaccatacccgccaccaacacctaccagcgcaggggtagttaccgttccaatacctaggatgaacggtatagtttgctgacctgtaggcgttgttactcctgcctgaccagcacgcttggttgactcaagatagttcttcagtcctttcagatacgcagcatctcgtcctttaaaagcgattcccgtctgggtagacattaaattaacctggcgcaggaactgatccggagaaccgcctgatttctccatagcctttccgatgatgccgttacgcatctgagcgcgtcccacctgaccgactgaccggtacagattctgaacttctgatttattcttgctgaacaacatgttgttgacaacttcaggagttagatcccctttcatcagaacgttcttcaagcgggtattctggagcttactagcctcatctgcgtataccgcattggcctgcttgtatctgcgcagagtgtcgtttccaaggttctggccaatggagttatcaatgtctcctgtcattgccctgtatacacgctgcactgccgcctcagctggcggtggcatttgtgtcctttctcctctgacatccatcctaaactgcgttctcagtctgcttaactgttccaggttaacatcacctttagccaattcattcctgtatgcctgaagtttgctaattgtatccgtgtcggcaacttgtcctaatttttgcagttttccaatctcatcatctatctgctgaattgctcgcgttggctgaatgttgactcctgtcattgcgctctgaacttgctcaagacggttccctgctgctttccgaattcctgatgtttttgccttcaggctgccaataacaattgacggatcatactcaccaaaccgtgatgcaaattcatctaccaactggctgcgcgcttcttgctgattagctcgcatagtgcttgttccagcaaatgggatgttttcagcggtggtctgtgccatgcgcccgacgcgggaatttggctgcaaaacgtcagttgtatgcaaaggaacatcagcagcattagcgaactgaatagcctgctgcgcttctggtgcgatcgtcccgcgaatcccacgataagcagcaccagcggcacggcctaactgatttattgccccgcctaatgcaacaccagttcctaagtctgttgccagtgctcctggattatcacgctcactgtttgcagccaatgaaccaacagcgttctccgccaacaagcgtgatgcaccctgagcaactcgaccggcaatagatgatgcctgcgctgcaattctctcggccccaacaggagtcaaatatggcagtgcttcagagaagattttgccttctgtcgtctgtggagtaagcgcaccttgttgcaagccaaagtcctgctcaagtccttgtgtcgtgacgcgaggcgatggctgataagttccgtcaccaatgccaagcttctgaccagcccatgccccggcgctggcgactgcatcagccattgatgccgggatatttgccagattaacgccagcctgaagcaatccacgccccgtctccgcagcagcattgctaaggtcagacatgaagccaccttgttgctgtggctgcgccggtccatgtggttgttttgctggttgttgagccgttggaggtggataagcagcatagaaagcctgtttagcctgttcggcatcgtttccggcttgcggtgctactacttcattgaagtattgctcctgcgcctgtgctttctgctctggtgctaatgcctggtacttttgagaggcaataacgtctttccatgccttagccattaatcaccccatagtgaagaaaagttgctgttggatgcaggctgtgattcctgtacaggttgagattgctgatactgcgatttaccaacattaacgttgtactgcttgttataattgttggtgtattcctgaatctcacgaatcgactgctgcatagcctccgggcttgagtagtcaacctgcggcataccctgaaaatacatctttgcttctgcaatggtgttgataccgctagcacccatatctcttgctgctgccacgccctgattctgcattcttccctgaatacgttgtgcggagttatataactgtcgttgttctttgcctgtgagtcggctgcgaacatctgcaccaattgccggatttcctgctccgccagtcattccagtcatgaaatcgagagcagaagcatctgcgtttgcgattgcatcgatatctttcttcatcgcgtagttctgtgcgcttgccgcagacgttggaggtgctgcaatagcacttgccgggacacgaaccatatttccgttatcgtcagtaccttcgtaaaatgcactagcgccagatccatgcagcttgccattgacattaacagtacgcccgtctgctaattgcacaacattttccccacctgcatccggcctgccacgaacacgaagataatttttttgttgttctggcgacaaactattgaaatactgatattcacggactgatgccggaaccgccccgcccgcagaacgtagcgagttttgggtactaatatcctgcccccttcgagcggtagcggcactaatatcctgccctcttgcggttaactggtttctttctccttcaagttggcgaccaaccatcttatcctgaacagcaaacgccttttctgtcccaagcgcaccgagagacatcgtagtcaacatgtgtgatagctgttctggattctgtactccagtctggatcatccagtctggattagcgccaacacggtttaacctgtccttgttatcagtaatgaatttactgtaggcttccggcccctgagaaagagcgacgttagccttcatggctaaatcgcccatatcgttacgctgctgctcattaagaccggaaaacgcctgttgtgcctgtgcaacaaacgccgggttttcctgcgcgaacttgatgagtcctgaattgtcgccagtagcccatgcgttggcatgaacctgattgaatgcgtttagcgctttctgttgctgttcctggttataaatatcagcaactccagccagaccacgcagccctgttaaagccacattattagcgcctgaacgggccaactcattgttttcgcgaatcagtccaagcgttgcgttaatgtcgcttgcctttggcgcgttctcattttgcgcaccaatgccagccagaaaaccaccagaattaataccctgttgccacgtagccattgattaccccttaaaacaacgagccaagcagaccaagaccgccgccgatcgcagccccccacggagttgatgaaccaattaatttcgcaagtccagccccagcaatagcaccagacgcacctccgccaatagcagattgcattgctgatggtctgttggcatttgccgctgcaagagccgcgctttgctgtgaaatctggctcatattgttggcatatgtctgtccggcgtttgcctgcccctgaagcgcaccaagaccaatatttgcaaggttctgatagttattcatctgacctgacagccattgctgaccaagtgttggggcgattgctgcaagctggttactggtcgctgtagaaccaaggccacctgttgcttctgccgctgccagattctgatagcgagcctgccccacaaagtcctggtattgttgggagttatagtaattattaagcgcctgcccctgaccttcgagagacgataaaccttcaagactgccgatatacttatctgccagaggagtaaacggcttcaggttgttcatgatggtgttgaactgctggttttgcaggtctgcggcatacttttgcgcttctgctgcatactttgcgcttttatctgcgccaccttttccgcctttttcaggataataaggttcctcaccgcgcagttttctgcccagcgtaaatgcatataacatgtttatctcccgtgattcaggaagtcgattagttcttcgcgtgtggcgctgtaaaacgtcacgtcatccacgcctttgaagtatttcttgatggttcctacacgcttaagaccaatcattgcgcagtacatctgaccgtggcgaaatttgcgtgcagcaaatgatgtaacgcactgaacggtggtattggtaagaatatatcgccagaacgtcagcccgatttccttactgaatccgcgaatctcaggcaggtacatggcgtggcagtcaaaggtcagcggctgaatctcgttgtaatacacgatgccaccgaactgaccatgtacgttcacttcgaaatagcggcactcaggtttgtagtcgtatccgtcaccgttgttactcccggcgatgatgtcgggatgattgccgaccgtttctatcaggtcgatgttgcgtgttggaatgaatgtaatcatcagttgattaatccatgagttcgtattgcatcttcgagagctttgatacgctgtcgcgcctgctgcaatccggtagccagagctgatacctcagactgcgtatatgtggcactgaccgtgtatgcctggttagcgttgaatgcaccgagaagcgcagcgcctgttgctgctgtccatccggtctgtcgagcaccgataactttagtaccgccaactgaataggacgttgtcacgttgagaggtgacgccagcgattgtgttgcggtagctgttttcgatacgtaatcaacctgcaatgcagaaatatttccttcagccgtcgtcactctaccatcaagagcactgacatcagcctgcaaggtgactatttctccttcagccgtggttagtctgacatccagcgccgcaattgcattggtatttgcagtaatacggatttcatggtcgtctacgtcgatgcgtaactgctgaattttcgcttcgtggtctgcaagctcaacatcctgctcatcgttctttacctgcgcgtcataggcaccttgccctgcttcgtttgcctttcccgcaatagcgccaacgtcagccccctgcgcgattacgtagagcagataagactggctgaagacgttgcgggggaggattgaggcatcaagacgagtggcctgaataatgacaggcttattaagtgacgggtctgccatatgttactccagacgaatttgacacccggatagtgttactggtgatttggtgattacccgcagtttgaatccgattaatcgacgaatgcgcccaacacgtttccagataacacgcttgtcgtacacaaacggctcattttgttcaatcatctgttcgcgaccgtaattgattccgtccgtggttgcagacagaaacaggcggtcagcatattgagcaacaccagtggatgattcaacttcgaggtcgaagcatctggcattgtccgctttgaagaggggggtaaacaacaggtgttcttgctgtagtccgtattggctgctgatgtcgaattgcaattgtcctgtcaacgcttctgatttatcgccgcacgttatctggttgccttcatacatgaagtcgacagcacgatatacatcatcgtaaagccctgttttcagcacacaccattgcggtccgttctgacttgacgatgcgtcgtaaaccagaacatgacgagggagatgaataatcagaagctcatgagaatcgaagcgcaaagtctccattacaccagtcgccagttcttcagctgtgtatgagcggataatcttctcaatactggccgtcgcaattggtgaagcctgccctgacccgatgatgtagacggaaggtgcgccagtagccgggtgactgatgaatgcatatgaatcagcgaatggcgttttacagtatgttccggcaatccccttctgtaccattaacgatggctgcgcgacatacaacgcagcgccaacggtggttgcgcctgtcagggagaaatactctatcgtcgacgagccaaagcagacgatgaaatctcgccatgaacctatgccaattatcccgtcaggctgcgattctgcgcgatattctgcactgtagcggtcaggatgcgattcatcttcaaggtcagtgataaaccatgaatctgtaccgtcttttgaccatgcataacgcccacgtaagcgagtaatgtcacggactgagcctaactcatactgcgtgaatccgctgtctgcaggccagtttgagacggttttaaccgcgccatcatagcgatactcgatgagctgaccattaacgcctaccgcctgtgatgtgcgaccatgtgccattgatacgcgaccgcttccggcaacatcaccgactacggcttcacctttgtagagcttgccgccacaaacacgatatacagcgttctgagcggtgttatactcaactccgcgcgatactccatttacatcgttgcgcttcgctatgcccgggaatgagcgtaaataacccgatgagttgagtacttctttcggtgtggccaacatattgattggtaggtaatcaatgtagtcggcattcttgaagtctttacccattcccttcatcatggggagttgttgaatcggcattctgctctccggggaaataatgccattcgttcagattggcgaaactattaccgctgcctgttggcatgcgtgacgggtaaggagctcttttggctctggcgatggcggtctgcttatagagaagctccttcccatatttagcggttgcgataattttggcggtagcctcaagcgcataatccggagcaattctgcaagccagattgtggaatactgcgctgattgcgcttgagcgaagaccgtggtcgtcaccttcggatggcgggttatcatcatctgagaatacatacccggtaacaatgcctttcccgtcctgataccactcagccatcatcgcttcaaggtcatctacggcatcctgcatagactgtggctcaacatcagtgagagttgcatctgatgctacaccaagcttacgcagcgccgccctgaccagatcgcctttagtctttatctgcatcgctttccgccttaggctttggtcctggctttttgcgttctttggttgccggttctttcggtcgcaggcttagcagacgattcaacacatcatctgccgtgtggccgtcccattccttgccaaactcaatttccgtgcctttaggcagatgttcaatttcactctctgggaggtggtatgttaccgcgccttctggggtgtcgatgccagctaacacccatccatcccattgctcgccgtcatgatgctgaaagctccaccatgcgctttcgcggaaggcattcattagtgttgaaaacaggcgcactcgatgtgcatatagttcgttaaaggtgtggtatccatcagatacttcacccatgtctttcttgaccacgcctgaatcaccgattggctcgtcattagtctccggaacctcatttggatgcctaacccaaccatcggcaaggtgatcttctacgtcgccgtcatcgacaactttaacctgaacgtccttgccccataccttcgttccacgaccctgcttatatagcattacacccatgtgtcacctcaaataagaaaggggccgaagcccctgttagttacgcagtctgaccaggcaggccaacaccgattgcttccggtcgtgtcgcgtttacgccgtaccacagcgcaatacggcacaggccggacagggtggaaatatcaccctgcgtagcgaagataccgttaaggccgacatccgggatgctgaatgaggtagttttcatacctgcaaacaattcgtggttagcaggaatcggctgagacacaatacggatggcgtcatcagcccagaacacgttggtacgggcatccttaacgttcaggatgttcaccgccattgcatcagccagtgaggtgttaacgttagcgtaggcgcgttgctcaggagaaagagaaacatcatccagtgctacaggcttcggcgtgatttcaacgtgagtaccatcaacaacgcgaactacggagaaagtcgcgtcctgcgccagtacgttcttagccatctgaccaaggaacttcacgccagtaaacgaaattttgtcgccgcgtttcaggccggtagttgcagacagggtgacggtagcaaaacggttatcaacgttaactttgttgccatcgttatccagttgccatgcgacaggcttgaaggactgcgcaccggatacagtgatgccagttgcagtagatttggtcagcacaggaagtttcggagagcgcaggacatcatcgaagccagcaacctgacgctggatagtgccatcgcggtacgcttcttcaggaatgcgcccgaagatatcgcgcttagtcaggtcataacccgcctttttgtagtcctgtgggttgaagaagtacgatgtccccatgtcgcggttaagttcgcgggagaacatcagttcttctgcatcggccacaaagttccatgcgtctgcggtgttagtgccgatagcgtccggcgaagtgataaccaatgaccccatctcggcggccatgtttgcgactttcagctcaacgttgttagccagtttgcgggctgcggactggattcggtgacgatacgctgtctcatcacgcaaatcatcggcgcgtaactggaagaagtcgttatctggctctcccatgtttaccgcgacgttaagctccagtaaccctgtcgctttatcagttaaatcccaaccctcctgagtgggggactcctgctctacaggcatccagatggtattgctggagcgctgcatggaagcagcaggcggggtgtatttcttggctttctgcgccattggagtgattgcggagatggtttcaataatctcatccaccgccagtgtaacaatttgaccttcgttcaaagccattatcggattcctttaagttttgcctttagcttgcggtaggtttccacatctcccttgctcgcagctgcatccatctgtttacgaatggcatctttatttgctgcgctgacatcaccggtaatcggctggtcagcagggggagcggaagagatttgtttaccgcgaggcttgagagttaagcgttcggatagtcgagtgagttcaatcagcgcggactgcccatccatcgccagtaactggcgggctttctccgggtttgcacccaggtgatacatgagcgcggcggacttctccgggaacaggcgcataatgtcggccccaaccgcaggcggaaccagttgcataaatgcgtcttctttctcctgatagtcagggatattgagcttttccgccgcgtcatagtgtttgcgggcagcttcgacgtattgcgctgatttctgggtaaactcctgagtcttgcggccctgttctgctacggcattgctgcgggcgtcctgcgctttcattagccattcggtattagcagcattgaaagcggcaagcgcacggctgttgtcatagtcatatttggccaggccttcttctgacagataggcattaatatccggctgaggtggaaggtcagggtttacccgtaaactctccggcaattctccgcatttaactgcttccatctgctgctcaagctcgcgctgtcgtttgcgctcgatgcggcggcgggcgaattctgcgttctttgccgggtcttgttttggtgctgtctcatcgtacttcaggacaatctcaaagccctcttcctgacctgcattgtcgttggcattatcgacaactaagctatcagcagatgccgctgcatgatcgccggacagggttaagtcttcagttgcctgaatttcggtggttggttccatgattaactctctcttattgaggtgtctcggctacactgccggaaggttgattttgtctctgcgattgcaggatgttggcaatgtccattcgctgcttgtgcgtctgttcattgcctttaaggagtaactcagcatttgcgcgagcgtcttcgctgcggtcctgctggaatgaagcaacggttttaaggaactctctaaactcagattgtttactgaggtccatgttgttgaagatttctgcgattctggcagcgttaagctggttctgcgcttcgactttagctgcatcgatttgcagggacagcgtctggttctgagctttagccagttcagcctgcccctgcaggagtacgccctgagcctgaaccattgccgggtcttgttgaccttgtttggcttgttgcgcctctactaaccattgctgctcttcaggcgtttctggcttcttaacgcccatctgaataagctgcttattggcataatcgcgcatcatctcaacgcctttgccatcaagcagtgtgaagtactgaagcaacagcagttgatattctggcgttccctgcggcgtcttgccgagcaactcaagaatttctgagcggttttgctgcttcatggactggaatgatggtccaacatccgtgtagcactcatagcgccccctgatatcgttcagtacctgccgttcaccagtggcaaggtcaacaacctcagccattagctgaacctctttctcactaccatcctcaagggtgattgtcacgttgcgaggaacatcgtagatgtcattaactatcgactggtaaatctcaccgtcacggcgcatagcggtagccagattatcctgaaacacgtatgtctcaaggtcagcgcgcatgtttagctggttaacagtgtcgtaggctacctgtccaccgtttaccgcctctgcatcaacacctagcgtcgcgacctctttcactgccgcggtggctgcttccagcatgtaggcgttggcttgcgggacctccgggttttcgtaatatgccagcggctgagttggcatttctccgttgttctcatccgtgcgattgagcaggtagtatgggtaatcgtcgttaccgtcatacatatgctcaaagcctgcaatctgctcaggccagaagaaaggcttcttctttggggtgcgggccacgatgtcggcgttgaacgacataatcatgttgcgcagacgctgaccgtcttttgtcaggcggacgaccccctcatacacttctttatcttcaacgaagccccactctccgaataccggaacaatggggatatgttctccagcaatgagttgcttatctttcagtactgcggtgcaggtgataatagatttgtatacccggcgacgcttaatctggcgctctgcaattttgataaatccactatcagccaggtcgtcgatgacgtctttaatatcgcgcttaaagtagcttaccggctcacccgtaaccgggtcttggtagataaacgccgtctctttcttctcgaccacttcgtaaaactcagcgatctgaattgtgtcctgcgtcagccatggaaatacccaatcgttggggttctggaatgatggaatattatcagcatcgaggtcgtatttttctgcgaaatcatcccagccattctggctcattgagtggataactgtgcagtgacgggcgtcagacttgtccatcagtttgctgttgctgtcccagataacatgggagcaggcactatggataggctctcgacgaataacctgattgttactcgtcgggctttggtcttcgtaatcagtgaccagacgccacgcacccacgcctgcttcaatctgctcacgaacggctatgttgacagcaattttcgccgtattgtgccgcatgtcggtgcgatacatgcccatcagcacatcagcggcgtcaggacttgctccatcctttggacgatacagaacatcaatagggttctgacgcatctcagaaacgagcttgcgcaccactggacgtacaacatcgaactgcccgcgatactgcagggttgtgtattgtgatagccagtcatcccactgagatacgcgggagaagaagagatcattcttggcctcccttctggcttcatcgctggctgtccagtccgcatcaaagcgcgacaggatactctccagcctgttttcattgtcggccattatcgtcctctgcgtactggtctaatcggtgcggggattttcttttctttcggctttctgatatcgcgcatcatcctggcgaagcggcgcatcatgtagccgtagcgagtagcatcgagcacatcatcgttggtcttgacaatcttgccgttctcatcgcgatgatataggcggaactcttcaaaaaatggttcgcatgtattgaatgctttgaatcttccttcaagcatcaggtcacgaagttcactaatgcctgactctactgagttaccgccatccgggaacgttgcgtgatcgggaagcatagagaacccggcatccgcatattgggttttaagttgctcaccaccgcccttttcgtgttggtgaccgtcatgaggccacgcgacaggtattttgttagcccacgacttaacagcaccccatgcctgaacggcagtgttctctgatttcttccatacacgcgccagatagaaaacatctgcgtctttgtcccaccaaagctgaatgtgagcttgcgggtggttccagccgaagtcctgagcgtcgataacatagaagtgatcgggacactcaaacggctggcacttaatcgtctcttccggtatctggaatattcgaccgctacccatcgtaggaataccacgagcacgtgcctctctctcatgctcaggataggatgctatgatttgctctttctgctcgtcggtgtagtgctcagcatcatagatggtcatgttgaccactttctgcgacttactgggattcttcaggaacttggtaacaacgtcagacatccccatcagcggggtaaacgtcagaattgagaattgcccgtatttgtttgtacgggtaagaccttcgccatagatgctatatggcggctcttcgtcaaaccagacgccgtgaattgtgtcgccctgccagcgggcgcggccctgtgagtaaggcttaaagtagcatattgagatgccatcttcgacgccttctggcgtgtggtgcttaacaagaaggtgatcaacaagattagggaagaacggagacttcttccagctaatgatgtcctctttcgggattgacccatagccaggttcatcattctcttcgatacgcccgcacaggatgcgttgagtcgttttggttacagtctcgtttgtttcaccgccaacccagaagacaactggctcatagaaacgcttacctttccactctccgccatatttaccatcagccggataacctttcgttcccgggtatcgcccggtaaggtgaaacgcgacttcagcagcgccagtaaatgacttaccaagctggttaccagccataaaacatcgctctggataatcatgacctgcgtcgatgaactcacgctgtttgctgtatggcgtaaactcatatagcaagtgtgtatttcggtagttctcttcttcttcgagtagctcgagcaattcgatttgctcttcgtcgctcaggttatcaagaatcgcgtccagttccacggttgaatagctccttgatacgagagcggcgcttatcgcgatctcccttatcaggtgtcacgtcttcaaattgcgactgctctttgaggcccaaatcgcgggcgatgatgttagcgttgagaagatcagcggctgcgccggagaatttctggtcgtagatgatttgctctgctcgcgtaacgacctcagataagtcttctctcaccctgtattgtcgccatgtctcaagcgtcacatcgaggaatagcgttagcccagtgatggtcatcgccctcatcttggcaataggctcttgtgtaacttctccttgatatgagaaagccttcatctcccatagtgggttagcctccacccactcgaagtattcacaacaagcagcccacagcgcctcaggcgactcgaatttcgggttacgcccatggctactgcgggcctcccagaatcggttgccctttggtgctgccataagttaacttcctgatgttgtttcgatagtcacgttagccgaaccatcaaaggacgctgaacctgtgaccgctccggttagtgtgatagtgcgggcagtagataacttatccgccgtctctgcattagctactgaaccgcttgcagaagtgtagttagcttcaaatgctgtcttgctcatatagagcagctcgccgtactggctccggaacagatatccgccaacctccggcttgaatacggctactgtttgcgctgacatgtactggtcagcatacgggccgtcgaattctgcgtttgcacttccgtcattagcgtatttgatagctttaatcggaagcgcagacacatatacaccgtcagcatctttgtatagaggccatgatggcgtgaagtttgggtttgccattacttggctccttctttttctggttcatgaaagaacggcaggaagtgactgaacattctgtcaagcatgtagcagtaggtttcgtttgcgtcgccaggataagtggttacaccaacatctcggcagacataaaatgcaacgtgagcgcattcatgaaccaatgtggccgcctcaccattgaatacaccaagcaggtaaagattctcgcctgtttcggtattgcaatatgactgtgttgcccccgccagcatctcattcccgccgctaccaactccaagatgaatgcaagcctgatcccactcttcctttgaacgacacaggtagacattggcgctatggaacaatggcacgaagaaccggggaagtttaggccacttcgtctttgccattcgttatgctccggcagtgaacaggtctaacgcttcttttgcctcacgaatagccttttctgcgcgagctaatgccgttccttcaccctgcgccaaaaccagttggtctttgaacagttcgaagttcagcttacttccagcaacgaatgcgatcgctttctctgctgctgcggtatcgctttgaactaaacggaggatatcgaggttcatctgctgtaattctgtcaatgctgtaatctctgccattgtgttggctccggttgttgggataagccattgtctagaccactcattgaatggcctctgcaataaccgatgtctttccatcagtccgccaccacaaagaatcttttttgccataaggctggaggttcatctttcagtggctgccagtgttatttccccacttactggcttgggttgtttcgcggtactgccgtaatgtacaaactggattaaccagcagaatcacaccattccgggcaaatacatttgcacttcatttgctgctctctcacgtgcaacatgaagcaatcttgttcgcccaccaacgccccacttagccatttgacttgcacactggcttatcgctttggtttcagtgctgatgatgtggtcaattttgttcaggcgagacatggcaccaacgccgagacggacaatcgttttaaaaacttcataaacctcgatttcaaattccggcttaatccatgctgcatatctgattgccagtagttcaacgccccacacaccaggttcggtaccacctttaatgattttaagtggttgaatttgtttcaaagtgcttttttgcactttggcctctagtgcttttatgaagcgttttatctgcgcgctacacaaaaacttgcttgggcgctgttgctctgtagcctctccatttgcaactgctgctgcatggagatcgtttaagttgtagcgtccgtcctcatcaacacgaacggacacaccattgaccataactgttgggtacttcatcagtgatcacctttaagtgatgaaccttgtcacacaggattccggcccacagaaaggtaccgatcaccaaaccggcatcctcaagggtcatcctgaaaggttctgtgttcagaagtcgcgcgtgtgaagcgcatttactgcggatacaaaaaagcccggcattacgaggcattttcatgaaagtcacttgtcaaatttctatgtgatggaaattatttcaggcattgcgtcctgatgtactcctgaagcgttctcagtgctgcttggtcgctgatgattccgtcccggataccgagaacgtttcgtccagcaactggagagagttcgacggtggcatcattgcccatgccggaggcgctggaggtttcggctgaggatgacacagggcattttcctttgacgagcacccgaccaccattatcaagcttgcgccgaagagcatcattctcagctttcgcatcagcaagctcctttgtgtatctggcgtcaagttctgctacatcacgctggcgcgtttgcatatcggtaattgtcgcgttcgccagcgccagcttttgagtaacagtgtcgcgctggactttgtaggtgatggcgttatcacgataatgattaacagcccatgacaggcagacgatgatgcagataaccagagcggagataatcgaggttaatctgctcattgcttaccccacaaacagacatcacgctcaacctcacgacgagtcatcaggcctttccattgcttaccgccagcgtatgtccagcgacgtagctgatcacatgcacctttgatatcaccctgattgattttgcgaagaagcgtcgatgttctgaaattgcctgcgcccacattgtaaacgaacgagtaaagagcgccgcgcgttgtttccggtatatctactttgatgtacgggttaatttgtctggcgacagtgataaggtctttattcaggagggctttgcattctgcttcggtatacgttttaccaggcatgatgtcttttccggtgtggccataacacacagtcaacacaccgactacgtccttatatggtttgtatctgacaccttccagaccatcgttaccaccggggccagtgattaacacagatgctatagcaatagccccgccacttatcgccgccattacgctatttcgtagtgccggtgacattgccattcaatctgtcctcacgctctttgcgtttgtagtaccagttgatgccaaatgtgccgacagtacaaagaataccaatgatgacagcccagtcattcagggagagaatgccacccatcgcagtcagtcctccgaagctgtaactgaaccattctctgattttgtccatacggtacatgctctaccccttcattgaggggatttgctctatttaattaggaataaggtcgattactgatagaacaaatccaggctactgtgtttagtaatcagatttgttcgtgaccgatatgcacgggcaaaacggcaggaggttgttagcgcaacctcttgcccccatcctcacgaagcccagccatagtgctgggttttcttttgtgtaaaacgccctacccagtcgccacgaatgagcaagggtatctggatatgttctggtgattggtgatagggcgctttcagaaatgtcgttcttaaaacgcaaaaagccccgcatcattgcagggccttttttttaaatccaccttaacaaagcacggatttctactgttagggttatgatattctacttttcgtcattttgcaagatacaatcgttatcggaataaaacttagctggtaactttcgataaaactacatttgcagcagactcctccatttcaaccttgctaattaatgactcatagaatggcttaatagccttatcccatacgcctggtgaaattgcagcggtgaactgacatatcgcacgaaagcatgaggccgcaggtatgcgctcatacccacgccctgagcactgcttgcaggatgaataaactggagcgccctgtagttctgatttcttcctgtccagcgctacgccacgcccacggcatttaacgcaagatgtagatacaacacctgcaccattgcatttagtgcatagtgattccgttacctccacagccgtctttgcaggagttttctctccacacccaggatgtttaacgatccgcttcttattccttaatactccgcgccccttgcagcacgaacacatgacattactagctgccgaccggcagtaatcctgatacgcgaaagttgcgagcgtttgcactactttccctttaacattggtatcaagtttgcgtaaggcagccaccttgtcgcaatgcttcatcccatgctgtaccagtaactgaattgccttacgcttatcgttgtcgctcaggttcatcttgccgctgaaagcactgaacccgagcggagcgcgactttgcgccataccaaatgctgccatcacatcggtattagtcagtgagtctgatgccgttgctctcggtgaatctgatagttgaggagacttcggagagtggaatttcacagtgttttccaaattcatgcagcatcgcctcccgatgtcttgttcaatccaagccggttcaccagttcacgctctcgctcatgcagataatccatcgccttctggtgttgctccgtcatctctctgacgctgcgcaattcagcttcgtcacgttcacactgctgtttcgcctggttaatgctggttacggtcatagatacctctcccgccctgatgaatcattaaaacgccgttaacgatggcgtgatacctggcttctttgtcgtacagataacgcctgactgtgtttcgatggcacgacaatcgcctggctacttctgtctggtttccgtatgtctcaatgagcatgtctggaatggttttgatagtgtgtgtcatgcggcctcccggataacctgctcatggctcagatattgaccccagcaactgaccaacaatctcgctttcacaacggctttctcttcgttgcgccacctgcagaaccagttaacagcgccttccatttcttgcctgaccttgccggcattgtcgaaatgcagcggatagacaacatcatcgaaaattgccgcagtggtcattgggtattggattttgctcatgctgcctctcttctgctgtcacgcaggtctttaagtttctgctgatactccgccttaatcgctttgcattcttcgatagtccagcgatggcggttatggtttgattcgatttcgtctactgcttcctgcccgatgcgattaatcagttcgacgcgatacggaacgagatttccgcttttgtgctggttgcacaccacgcattgcttgtgaatattgcgttcatcaaatcggagttgaggtgccgcagcagttgtccggtaatgcccggcatcccactgagcagacgtgagcgttccgcacgagacacatggtaagtcgcggtctctttctctgatgagggcgtttacggcttgttgggcttgtttaatccagtaactgcggggctttaaggcgagttttcgaatcttcagtttatctttctgtttctgttcctctcgtcgtcgtttcttctctgctgctttttccgctttttcgcgttctttgcttcgtcgctcgagtgctatcttggttccacactctggagagcaccaccactgattagcgaatgcagggtgaaaccattccctacattcttcgtttttgcatcgtcttcgcgctggtttagccatcgtcttcttcctcgtacattgagctattcggatcgctcatcagttctgcgcagcagtgctcacatacgtgaacttccagcacatgcagcttctgaccgcagttagcgcacgttaaagcccgctcgacgctttctttctggtattgaagggattgggatggactaagcattattggcgtcctgcatcatgagaaagacaatcatggcggcgcggagaggtctggtatcaaatattgggcttacgccttttgcatccacacaccattcagttaactggtctaagatagaaatcctgtgtttctcaataatcggccatgaggcactcggatcattgcagtaatcaggtaaatggtttaatggctcaaaagttgtatcagcgtttccgtaataccatttgttggtgttattccctgacgtttccggcttacatgcccaaaggcctttaaaaattatgtctcctaccattcggttaatttcaaaatcacttaactgtgaataatccattgtcatttcctcgcacgttctctaagccaccggatatcccacaggtgagccgtgtagttgaatgtttttacgtcagattcttttgggattggcttgcgtttatttctggagcgtttcgttggaaggtatttgcagttttcgcagattatgtcggtgatacttcgtcgctgtcgtgccatacgtcccccttcgtctctggcagcgggaaattacctactggcgaccgctcacatctgatacaccattggtgccaataaggttgatttggccggaatcgataatcgtctttgctttctccgcagcggtagcagtgtttcatgcggcgtctccaaacctcgctttccattccagtgctaaccgggcttcgtctgaccacttaacgccgcgctctgtaccgaatgcctgtataagctctaatagctccgcaaattcgcttacacgcatcctgctggttgactggcctattaccacaaagccattcccggcaaggttaggaacaacgtcctgctgctttaatgccgcggtaaacacacacttccagctttcagcgtcaagccatcgtccatgccagttaacctgacgtgagacatcacaaaggcaagcccaaagcttccgattttggtctaagctgcggttgcgttcctgaatggttactacgattggtttggttgggtctggaaggatttgctgtactgcgtgaatggcattttgctgatgtgctggagatcgaatttcaaaggttagttttttcatgtcttccctctcccccaaataaaaaggcctgcgattaccagcaggcctgttattagctcagtgatgtagatggtcattgcttcatctccctttccatttcatcaatgtcaacgtcatcaggaagatgggagcaatacgctgctataccatgatgatttatctcataccctttgaacgttgccatctggtgcgtaatctcaacttcgtttaggaatccgtcatcgcataactgcctggctattttcgatttggtctggattattggtagtgcctgttctttcaaagcgtatgatatttgtgcatcccatgccttttcgagaatggctaattgttttttattcatacgtcagccccttgtgcatatcgtctgccacgcgcagcaggtgcatttgatgctgtgcaaatctgtctggcttcatcctggtcacatgcaacaaagtgtccgttgcagaaccgctggtaaaccgtaccaagcgagccaaaacggtttttcgtcacaatgatttcagcaaatggtgcggcgctactgttctcgtcgtataccgcttcacggtaaagcatgatgattgagtctgcatcctgttcaatgcttcctgaatcacgcaaatctgcgtttgtcgggcgcttgtttggccgcttctcaacatcgcgtgaaagctggcttagggagataactggagttttcaggtctttcgccatcgctttcaggctaccggagatatgtgctatggcgaggtcattacgttccgcttttggtttctcaattagcccgagatagtcagccataatcagtgacagattaggatgctcctgcttgtggcgttcggaaatggacctgatttcttcgacagacaaacgcgatgcgtcaactacccacacatccagatctgccagcaacttcatcccgcttgcaactctcgcccatccttcatcgtccattcgtgacgggttacgcagcacactgaccgacatcattcctgcgccggcaatccctctctcaacaacctgaatggcgctcatttccatcgagaaaatcaacacaccgcgccggacgccagaaccaggaataacacgacttgccacgccttcggctatcttcagcgccagttcggttttacccatacctggacgagcagcaataatcacaaggtcttctgcgttcattcctccggtgatagcgtcaagctcttcgattccggtcttcagggtatccgactcttctccgttcctcagacgcctgtcaagcgtgtcagtgtaatcattgataatttcccccagtcgcacaggtttaacctcgttgcgtggcttcctgatggctgaaagacgcttaacaagatcgtccatcgctctacctgaagcatccagcgtgccgttactgattggctctcgcatctcatccagtagctgtaaaacctgacgccgttgataactgtctacaaccattccggcataacctttcaggtttgcagcgctgggacatgaccgcgcagtcatcatcaccgccgttgcgtattcatccccgcactcctcggccaccatcagtccatcaatcaggttcctgtttctggcctgctttcgaataacttcaaaagctttccggtaaagcggaattgagaatgcttcaggctccagcgttgccagaacgtcactcgcggttggtgttaatccaccaatcagcaagccaccgataacgctcgcttcgatatcctgtctcatgcaatccccctgtctgcaaacttcccttcccgaactcccgttaacgaatcttccctcagcaggtaatcaaaatcagccgtccagcctgtgtcgttgtctccgaagtaaaacggcttggcctgatgcacaaacgccctgacatacgccctgaaaccgtccacgtttggcgttttcagttgcgggatgattttcttcaggcggcgtttccgtttctcgttgaccgaaacagcatgtggaagtctgtcaccgacttcggtgttgtaggcgttcaggaaggattcgtagtcgattcgttctgccttgcgacgttcaggtttaacctgcccatcgccgcccccgttagggggtaagggggtatttgtatttattgtcttttgtatattgtcttttgtgtttagctgacttggcttatacccattagccgacttggctaatgttttattagctgttttagctaatgttaagctgtcctggctaatccactgcgaaaccaccttgttcactccgattttcacgccatcagcaatgaggaatttacgctcaataagctggcgcttagcagcgcaaacatgagtgtgatgaatacctgtcatggctgctatctgcgtgtttgtgagtcgatccatcggcttattgaatccgtatgtcttgcgcatgatagcgagcatcaccttcaactgccggacggttaaatcagccatcagcagactgtcggtaatctcgttagcaacgcgcatgaaaccatcttcggtatctgccacgcgatgctccacgacctccagatgaggcctgtaatcagctaacttaacgacgcccatgtttcactcctgctttggctagtctgtaaacaccaacaaggcgctctgcgaacgccctgttatttgctgcggctactactaatccctcaggtgaatcagggtgtcgaatctcttctttttcctggtatttcttacgacgttttgtcataatgactcctgtggattgatccagtctttctacatcaggcctcgaagaattcgccgttcttcggggctttttcttttgtcaggtaggtagcaagtcgcctggtgagctctgccatttcctcgtcttcgattccatactccagaaccgcaagcatcatgctgacctgagagaagaaaccgttcttccatcggcttacctggtattcaggaacacccatagctttagcgaatgtcttctggcccatcatggctaacttgttgagtaaggtggactcgatgcgagccgccttcttgcttttagttgcaactacgttcattcaaaatattccttagaaattagatagagttggattcgcaaatacacgcaaatccgtttaatagatttaccgcgttgtcggcggttcagattggtaaagagcgttgatacttaacttgctgccagtaagtcggctaaatcaggacgaagttctctggctttaattcttcctcctgtagcttttacgattgctgccacatacttagcgtcaatgccgccaccatgtaaccaacgccatacagttggctgcttaactccacacaaagaggcgagtttttgctggcttcctgcaatggcaacagctttttgtattgctttgttagtcattgcttattccctttcgtataacacacaacaaataatagcaatgagtattaatcaaagcaatagcaaaacgtgttttgaccattaatacgcaagcgtataaattgaatattatgaaaaaagaaactctctctgaccgtctcaacaaggcaatggaactggctggtatgtctcaaggtgctctcgctaaagcgtcaggcgttgctcagccaacgatctggcgtttgacaagtggaaacgctcgtgggtcaacaaagattgttgaaatagcaaacgcgttaggtgttaattcggaatggttgtctaccggaattggtcctatgaaaaaagatggaactactccgataaacgcatctccatcttcaaacacatttaaaatcgatatcctagatcttgaagttagcgcgggtcctggcgttatcaatcgagaattcgtggaaatactccgctcggttgagtattcgcaggacgatgccagacacatgttcgatggtagaaaggctgaaaatatccgcatcataaatgtgcgcggagatagcatgtcaggaactattgaaccaggagatctgttgtttgtagacgtaagcatcaaaaacttcgatggggatgggatatacgccttcctctatgacgatactgcacatgttaagcggctccagaagatgaaagataaactattggtcatatctgataataagagttattcagcttgggacccaattgaaagagatgaaatgaatagggtttttgtctttggaaaggtaattggaagcatgccgcagacctataggaagcacggttagccagccaatggcctgatgagatattcgggtgatgatggaccgaagggatgtttgggtgatagtgattgtgtgaaacaggtcgcagaaatgcggcctttttacaaaaaaatgcaagcactcaagatagaatatatgcttgcttattaatttatatacttgatattatgcaagcacatttcacaacaaagagtgcttgcataatgtctgataaagaaagcaaagaaccaacgggaaagtccaaaggtggtgtggcaagggctaatgctctttctgcagaagaaaggtcggctattgcaagaaaagccgcagcagctaggtggggtggcgatggtgaggtggaaattgccaaaagatctggcgacattgtcattggagacttaaagatacaatgtgccgtgcttgaggatgggacgagggttctgtcagagagagctatcactaaagccttcggcgggaagcgtggaggctcccactggaagagaatgaaagagaatccagatggcgcctatcttcctgttttcttgtcagctaaaaacattaagccattcattaataatgaattatcagaaggcctatcccggcgccgtcttttcaaaataaataaaggagcggcgccagcttacggcattgaagcatctttgctcccaaagatatgcaatgtttatttgaagatgagagatcagggtgatgcccttcagtcatctcagatacctatttctgttcaggcagacattatcatgcgcggtcttgcagaggttggtattgtagcgctggtagacgaagctactgggcatatcgatgaaaagagacaagatgaatatcgaattctctttcaagagttcatcaaagagcaggtcagagaatatgagaaggaatttccgaagcagttcacggatggcctttatcgactttacggacttacgcagaaaaaagcaggtcggcaccctcagtttttcggtaagtttacgaggaagtatatctacgaaccattagcatcaagtaaaggcgccatccttgagatgctagatgaaaaaaaccctgtcgtttatgcgaatggcggtagaagatataagatgtttcagttcctaaccgatagcatcggagttccgatgtttagggcgcacctttggcaggtagttggcatcctttcaagctcaagaaataaagctgagtttgacagagcattcaaaagagcctttccatcgcccgggactcaatttgagttgctagatgaagatgagtaagcgatcacgcccggccaccgcgccgggttttctttgccctactctttcggcagcgtcagaacatcaatagccagttctacagccaagtccacatcctcttcctgccacagtacctgaatcatttctatcaaagcttcacgcgaaggttcgcgctgctctaccagtacctgcatcagcgctgtaccgagaacctcaaccacctgcgggtgaagctccgcaaagaactcttcctcacttttcacactgattcctcgctcgttttttgttcagaacagtatggcatagaggatttataaaaataaattcattttgctatcaacaacataataccaaaaaccactaattaatagcaaaacgtattgatatggataatactcaatgctattgtttagccatcagcaggacgctggtagccaaacggaaaggcaacgctctttaacttcgatgatgcgctgacaaagcgcgaacaaataccaaacgagatgggtttgggttgcaggtagaagccaacctcttcggcggaggcgctcggcaatgagtacgcggtcagggttagtcgcctggctatctgcaacaccaaagctatttcacatgaggattaaatcatgacggttatcacctacgggaagtcaacgtttgcaggcaatgctaaaactcgccgtcatgagcggcgcagaaagctcgcaatggagcgcgacaccatctgcaatatcattgattcaatttttggctgcgatgctcctgatgcttctcatgaggttaaagccaaaagaattgaccgcgttaccaaagccatttcgcttgccggaacgcgtcagaaggaagttgaaggaggatctgtacttcttccagacgtagcactttacgcggcagggtatcgtaagagcaaacaaataacagcgaggtaaaacatttgtcggttaagtcgttatttttttggcctgctcgtcctgtgcaataagttcattcataagaatgtctgactccccggcaaacctaatgtagcactcatttctatagctttccgggataacaaaacggtcggtatcaggatatccagtagcagaaggtatccgaataagaagccctttttcgagcaatgaaattgcttcagggcttcccttttctgtctttagctggttattagcggctacagcgaatgccaaatacgctctttctccaagagttaacgaatcaaacaaatcccgaacgactttttcttctctggccttacgctgctgagcagttgatgcctcaattctttcattcacgacatgataaacagaattaacaacaccattcagcacatagctaacacagaacagcaggatgtaatacatccagtactgaggaaggatttctggattatgcaggtttacccattctttcacgcttaccggcataacgacaatcagtaaaatcaggatgatgatcatatgaatcaactgtttaagtgtcattccttgcaggaaaaaacgcattagctcctgccaccatgagttgttcatcggcgattctcttttgctctctgtaggggtgaatagagtttatccgatttctcgctgtaggggtacacgagaaccaccgagcctgacgtggttaaaagacaggcacaatctttactaccgcaatccactatttgagatgagatatggaagaagaatttgaagagttcgaagagcatcctcaggatgtgatggaacaataccaggactacccatatgactacgactattgatacaaatcaatggtgtagtcgttttgtgaaatgcaaaggctgcaagcttgatgctgaatgtatggtgaagcctgaggaaatggctctggtgagagaagatggaaagattgtcgataaatgggcaatcagaaccacggcaatgattgccagagagctggaaaaactaaagtctacatagttggccttcttttatctcacttcaaatatctaatcaggtcgcaatgcggccttttttattgccaaaatttaaggaataacaacatgaattcagcagatttatcgaagattcttgaagaacacaaagtgtggattacctcaatgcgtgagagcggatctagagccaacctgtacggtgcc

SEQ ID NO: 2 - DNA, 41390 bp, unidentified
  source 1..41390: mol_type = unassigned DNA
  misc_feature 1..41390: note = the genomic sequence of a bacteriophage
tcaggagatgctgctatcaagtgtgcattggcctcacattcagctacgcgattttcgtcatgggtcatgataaaaccaagctgcaacccagctctatcttgcctgcaaatgcgtacatcctttccgctccaaggacctggcgtacctttaaactttttcatattcacctctgtgtctcgctgccaaaaatacgcttactcagttacttcatctgcatattctttacttgttaaccaatccgggcgttcacctttaccaatatagaaatcgataatgtccagaagacgtggataaaatttaagagctttacgaccatccatctcagcaatttcctgcttactatattttctccattcctcaactgtgtggttctggcatcctgctcgtacatattcaccgttcgttatacttatgaagtatttctcacccagaattacgaaagtgagatcaggcaggtcggcatcgcgcaggtcggcaccgcacaggtcggcatcgcgcaggtcggcaccgcgcaggttggcaccgtacaggtcggcaccgtacaggttggcaccgcgcaggttggcaccgtacaggttggcaccgcgcaggttggcaccgtacaggttggcaccgcacaggttggcaccgtacaggttggcaccgtacaggttggcaccgcgcaggttggcaccgtacaggtcggcaccgcacaggtcggcatcgcgcaggtcggcaccgcgcaggttggcaccgtacaggtcggcaccgtacaggttggctctagatccgctctcacgcattgaggtaatccacactttgtgttcttcaagaatcttcgataaatctgctgaattcatgttgttattccttaaattttggcaataaaaaaggccgcattgcgacctgattagatatttgaagtgagataaaagaaggccaactatgtagactttagtttttccagctctctggcaatcattgccgtggttctgattgcccatttatcgacaatctttccatcttctctcaccagagccatttcctcaggcttcaccatacattcagcatcaagcttgcagcctttgcatttcacaaaacgactacaccattgatttgtatcaatagtcgtagtcatatgggtagtcctggtattgttccatcacatcctgaggatgctcttcgaactcttcaaattcttcttccatatctcatctcaaatagtggattgcggtagtaaagattgtgcctgtcttttaaccacgtcaggctcggtggttctcgtgtacccctacagcgagaaatcggataaactctattcacccctacagagagcaaaagagaatcgccgatgaacaactcatggtggcaggagctaatgcgttttttcctgcaaggaatgacacttaaacagttgattcatatgatcatcatcctgattttactgattgtcgttatgccggtaagcgtgaaagaatgggtaaacctgcataatccagaaatccttcctcagtactggatgtattacatcctgctgttctgtgttagctatgtgctgaatggtgttgttaattctgtttatcatgtcgtgaatgaaagaattgaggcatcaactgctcagcagcgtaaggccagagaagaaaaagtcgttcgggatttgtttgattcgttaactcttggagaaagagcgtatttggcattcgctgtagccgctaataaccagctaaagacagaaaagggaagccctgaagcaatttcattgctcgaaaaagggcttcttattcggataccttctgctactggatatcctgataccgaccgttttgttatcccggaaagctatagaaatgagtgctacattaggtttgccggggagtcagacattcttatgaatgaacttattgcacaggacgagcaggccaaaaaaataacgacttaaccgacaaatgttttacctcgctgttatttgtttgctcttacgataccctgccgcgtaaagtgctacgtctggaagaagtacagatcctccttcaacttccttctgacgcgttccggcaagcgaaatggctttggtaacgcggtcaattcttttggctttaacctcatgagaagcatcaggagcatcgcagccaaaaattgaatcaatgatattgcagatggtgtcgcgctccattgcgagctttctgcgccgctcatgacggcgagttttagcattgcctgcaaacgttgacttcccgtaggtgataaccgtcatgatttaatcctcatgtgaaatagctttggtgttgcagatagccaggcgactaaccctgaccgcgtactcattgccgagcgcctccgccgaagaggttggcttctacctgcaacccaaacccatctcgtttggtatttgttcgcgctttgtcagcgcatcatcgaagttaaagagcgttgcctttccgtttggctaccagcgtcctgctgatggctaaacaatagcattgagtattatccatatcaatacgttttgctattaattagtggtttttggtattatgttgttgatagcaaaatgaatttatttttataaatcctctatgccatactgttctgaacaaaaaacgagcgaggaatcagtgtgaaaagtgaggaagagttctttgcggagcttcacccgcaggtggttgaggttctcggtacagcgctgatgcaggtactggtagagcagcgcgaaccttcgcgtgaagctttgatagaaatgattcaggtactgtggcaggaagaggatgtggacttggctgtagaactggctattgatgttctgacgctgccgaaagagtagggcaaagaaaacccggcgcggtggccgggcgtgatcgcttactcatcttcatctagcaactcaaattgagtcccgggcgatggaaaggctcttttgaatgctctgtcaaactcagctttatttcttgagcttgaaaggatgccaactacctgccaaaggtgcgccctaaacatcggaactccgatgctatcggttaggaactgaaacatcttatatcttctaccgccattcgcataaacgacagggtttttttcatctagcatctcaaggatggcgcctttacttgatgctaatggttcgtagatatacttcctcgtaaacttaccgaaaaactgagggtgccgacctgcttttttctgcgtaagtccgtaaagtcgataaaggccatccgtgaactgcttcggaaattccttctcatattctctgacctgctctttgatgaactcttgaaagagaattcgatattcatcttgtctcttttcatcgatatgcccagtagcttcgtctaccagcgctacaataccaacctctgcaagaccgcgcatgataatgtctgcctgaacagaaataggtatctgagatgactgaagggcatcaccctgatctctcatcttcaaataaacattgcatatctttgggagcaaagatgcttcaatgccgtaagctggcgccgctcctttatttattttgaaaagacggcgccgggataggccttctgataattcattattaatgaatggcttaatgtttttagctgacaagaaaacaggaagataggcgccatctggattctctttcattctcttccagtgggagcctccacgcttcccgccgaaggctttagtgatagctctctctgacagaaccctcgtcccatcctcaagcacggcacattgtatctttaagtctccaatgacaatgtcgccagatcttttggcaatttccacctcaccatcgccaccccacctagctgctgcggcttttcttgcaatagccgacctttcttctgcagaaagagcattagcccttgccacaccacctttggactttcccgttggttctttgctttctttatcagacattatgcaagcactctttgttgtgaaatgtgcttgcataatatcaagtatataaattaataagcaagcatatattctatcttgagtgcttgcatttttttgtaaaaaggccgcatttctgcgacctgtttcacacaatcactatcacccaaacatcccttcggtccatcatcacccgaatatctcatcaggccattggctggctaaccgtgcttcctataggtctgcggcatgcttccaattacctttccaaagacaaaaaccctattcatttcatctctttcaattgggtcccaagctgaataactcttattatcagatatgaccaatagtttatctttcatcttctggagccgcttaacatgtgcagtatcgtcatagaggaaggcgtatatcccatccccatcgaagtttttgatgcttacgtctacaaacaacagatctcctggttcaatagttcctgacatgctatctccgcgcacatttatgatgcggatattttcagcctttctaccatcgaacatgtgtctggcatcgtcctgcgaatactcaaccgagcggagtatttccacgaattctcgattgataacgccaggacccgcgctaacttcaagatctaggatatcgattttaaatgtgtttgaagatggagatgcgtttatcggagtagttccatcttttttcataggaccaattccggtagacaaccattccgaattaacacctaacgcgtttgctatttcaacaatctttgttgacccacgagcgtttccacttgtcaaacgccagatcgttggctgagcaacgcctgacgctttagcgagagcaccttgagacataccagccagttccattgccttgttgagacggtcagagagagtttcttttttcataatattcaatttatacgcttgcgtattaatggtcaaaacacgttttgctattgctttgattaatactcattgctattatttgttgtgtgttatacgaaagggaataagcaatgactaacaaagcaatacaaaaagctgttgccattgcaggaagccagcaaaaactcgcctctttgtgtggagttaagcagccaactgtatggcgttggttacatggtggcggcattgacgctaagtatgtggcagcaatcgtaaaagctacaggaggaagaattaaagccagagaacttcgtcctgatttagccgacttactggcagcaagttaagtatcaacgctctttaccaatctgaaccgccgacaacgcggtaaatctattaaacggatttgcgtgtatttgcgaatccaactctatctaatttctaaggaatattttgaatgaacgtagttgcaactaaaagcaagaaggcggctcgcatcgagtccaccttactcaacaagttagccatgatgggccagaagacattcgctaaagctatgggtgttcctgaataccaggtaagccgatggaagaacggtttcttctctcaggtcagcatgatgcttgcggttctggagtatggaatcgaagacgaggaaatggcagagctcaccaggcgacttgctacctacctgacaaaagaaaaagccccgaagaacggcgaattcttcgaggcctgatgtagaaagactggatcaatccacaggagtcattatgacaaaacgtcgtaagaaataccaggaaaaagaagagattcgacaccctgattcacctgagggattagtagtagccgcagcaaataacagggcgttcgcagagcgccttgttggtgtttacagactagccaaagcaggagtgaaacatgggcgtcgttaagttagctgattacaggcctcatctggaggtcgtggagcatcgcgtggcagataccgaagatggtttcatgcgcgttgctaacgagattaccgacagtctgctgatggctgatttaaccgtccggcagttgaaggtgatgctcgctatcatgcgcaagacatacggattcaataagccgatggatcgactcacaaacacgcagatagcagccatgacaggtattcatcacactcatgtttgcgctgctaagcgccagcttattgagcgtaaattcctcattgctgatggcgtgaaaatcggagtgaacaaggtggtttcgcagtggattagccaggacagcttaacattagctaaaacagctaataaaacattagccaagtcggctaatgggtataagccaagtcagctaaacacaaaagacaatatacaaaagacaataaatacaaatacccccttaccccctaacgggggcggcgatgggcaggttaaacctgaacgtcgcaaggcagaacgaatcgactacgaatccttcctgaacgcctacaacaccgaagtcggtgacagacttccacatgctgtttcggtcaacgagaaacggaaacgccgcctgaagaaaatcatcccgcaactgaaaacgccaaacgtggacggtttcagggcgtatgtcagggcgtttgtgcatcaggccaagccgttttacttcggagacaacgacacaggctggacggctgattttgattacctgctgagggaagattcgttaacgggagttcgggaagggaagtttgcagacagggggattgcatgagacaggatatcgaagcgagcgttatcggtggcttgctgattggtggattaacaccaaccgcgagtgacgttctggcaacgctggagcctgaagcattctcaattccgctttaccggaaagcttttgaagttattcgaaagcaggccagaaacaggaacctgattgatggactgatggtggccgaggagtgcggggatgaatacgcaacggcggtgatgatgactgcgcggtcatgtcccagcgctgcaaacctgaaaggttatgccggaatggttgtagacagttatcaacggcgtcaggttttacagctactggatgagatgcgagagccaatcagtaacggcacgctggatgcttcaggtagagcgatggacgatcttgttaagcgtctttcagccatcaggaagccacgcaacgaggttaaacctgtgcgactgggggaaattatcaatgattacactgacacgcttgacaggcgtctgaggaacggagaagagtcggataccctgaagaccggaatcgaagagcttgacgctatcaccggaggaatgaacgcagaagaccttgtgattattgctgctcgtccaggtatgggtaaaaccgaactggcgctgaagatagccgaaggcgtggcaagtcgtgttattcctggttctggcgtccggcgcggtgtgttgattttctcgatggaaatgagcgccattcaggttgttgagagagggattgccggcgcaggaatgatgtcggtcagtgtgctgcgtaacccgtcacgaatggacgatgaaggatgggcgagagttgcaagcgggatgaagttgctggcagatctggatgtgtgggtagttgacgcatcgcgtttgtctgtcgaagaaatcaggtccatttccgaacgccacaagcaggagcatcctaatctgtcactgattatggctgactatctcgggctaattgagaaaccaaaagcggaacgtaatgacctcgccatagcacatatctccggtagcctgaaagcgatggcgaaagacctgaaaactccagttatctccctaagccagctttcacgcgatgttgagaagcggccaaacaagcgcccgacaaacgcagatttgcgtgattcaggaagcattgaacaggatgcagactcaatcatcatgctttaccgtgaagcggtatacgacgagaacagtagcgccgcaccatttgctgaaatcattgtgacgaaaaaccgttttggctcgcttggtacggtttaccagcggttctgcaacggacactttgttgcatgtgaccaggatgaagccagacagatttgcacagcatcaaatgcacctgctgcgcgtggcagacgatatgcacaaggggctgacgtatgaataaaaaacaattagccattctcgaaaaggcatgggatgcacaaatatcatacgctttgaaagaacaggcactaccaataatccagaccaaatcgaaaatagccaggcagttatgcgatgacggattcctaaacgaagttgagattacgcaccagatggcaacgttcaaagggtatgagataaatcatcatggtatagcagcgtattgctcccatcttcctgatgacgttgacattgatgaaatggaaagggagatgaagcaatgaccatctacatcactgagctaataacaggcctgctggtaatcgcaggcctttttatttgggggagagggaagacatgaaaaaactaacctttgaaattcgatctccagcacatcagcaaaatgccattcacgcagtacagcaaatccttccagacccaaccaaaccaatcgtagtaaccattcaggaacgcaaccgcagcttagaccaaaatcggaagctttgggcttgcctttgtgatgtctcacgtcaggttaactggcatggacgatggcttgacgctgaaagctggaagtgtgtgtttaccgcggcattaaagcagcaggacgttgttcctaaccttgccgggaatggctttgtggtaataggccagtcaaccagcaggatgcgtgtaagcgaatttgcggagctattagagcttatacaggcattcggtacagagcgcggcgttaagtggtcagacgaagcccggttagcactggaatggaaagcgaggtttggagacgccgcatgaaacactgctaccgctgcggagaaagcaaagacgattatcgattccggccaaatcaaccttattggcaccaatggtgtatcagatgtgagcggtcgccagtaggtaatttcccgctgccagagacgaagggggacgtatggcacgacagcgacgaagtatcaccgacataatctgcgaaaactgcaaataccttccaacgaaacgctccagaaataaacgcaagccaatcccaaaagaatctgacgtaaaaacattcaactacacggctcacctgtgggatatccggtggcttagagaacgtgcgaggaaatgacaatggattattcacagttaagtgattttgaaattaaccgaatggtaggagacataatttttaaaggcctttgggcatgtaagccggaaacgtcagggaataacaccaacaaatggtattacggaaacgctgatacaacttttgagccattaaaccatttacctgattactgcaatgatccgagtgcctcatggccgattattgagaaacacaggatttctatcttagaccagttaactgaatggtgtgtggatgcaaaaggcgtaagcccaatatttgataccagacctctccgcgccgccatgattgtctttctcatgatgcaggacgccaataatgcttagtccatcccaatcccttcaataccagaaagaaagcgtcgagcgggctttaacgtgcgctaactgcggtcagaagctgcatgtgctggaagttcacgtatgtgagcactgctgcgcagaactgatgagcgatccgaatagctcaatgtacgaggaagaagacgatggctaaaccagcgcgaagacgatgcaaaaacgaagaatgtagggaatggtttcaccctgcattcgctaatcagtggtggtgctctccagagtgtggaaccaagatagcactcgagcgacgaagcaaagaacgcgaaaaagcggaaaaagcagcagagaagaaacgacgacgagaggaacagaaacagaaagataaactgaagattcgaaaactcgccttaaagccccgcagttactggattaaacaagcccaacaagccgtaaacgccctcatcagagaaagagaccgcgacttaccatgtgtctcgtgcggaacgctcacgtctgctcagtgggatgccgggcattaccggacaactgctgcggcacctcaactccgatttgatgaacgcaatattcacaagcaatgcgtggtgtgcaaccagcacaaaagcggaaatctcgttccgtatcgcgtcgaactgattaatcgcatcgggcaggaagcagtagacgaaatcgaatcaaaccataaccgccatcgctggactatcgaagaatgcaaagcgattaaggcggagtatcagcagaaacttaaagacctgcgtgacagcagaagagaggcagcatgagcaaaatccaatacccaatgaccactgcggcaattttcgatgatgttgtctatccgctgcatttcgacaatgccggcaaggtcaggcaagaaatggaaggcgctgttaactggttctgcaggtggcgcaacgaagagaaagccgttgtgaaagcgagattgttggtcagttgctggggtcaatatctgagccatgagcaggttatccgggaggccgcatgacacacactatcaaaaccattccagacatgctcattgagacatacggaaaccagacagaagtagccaggcgattgtcgtgccatcgaaacacagtcaggcgttatctgtacgacaaagaagccaggtatcacgccatcgttaacggcgttttaatgattcatcagggcgggagaggtatctatgaccgtaaccagcattaaccaggcgaaacagcagtgtgaacgtgacgaagctgaattgcgcagcgtcagagagatgacggagcaacaccagaaggcgatggattatctgcatgagcgagagcgtgaactggtgaaccggcttggattgaacaagacatcgggaggcgatgctgcatgaatttggaaaacactgtgaaattccactctccgaagtctcctcaactatcagattcaccgagagcaacggcatcagactcactgactaataccgatgtgatggcagcatttggtatggcgcaaagtcgcgctccgctcgggttcagtgctttcagcggcaagatgaacctgagcgacaacgataagcgtaaggcaattcagttactggtacagcatgggatgaagcattgcgacaaggtggctgccttacgcaaacttgataccaatgttaaagggaaagtagtgcaaacgctcgcaactttcgcgtatcaggattactgccggtcggcagctagtaatgtcatgtgttcgtgctgcaaggggcgcggagtattaaggaataagaagcggatcgttaaacatcctgggtgtggagagaaaactcctgcaaagacggctgtggaggtaacggaatcactatgcactaaatgcaatggtgcaggtgttgtatctacatcttgcgttaaatgccgtgggcgtggcgtagcgctggacaggaagaaatcagaactacagggcgctccagtttattcatcctgcaagcagtgctcagggcgtgggtatgagcgcatacctgcggcctcatgctttcgtgcgatatgtcagttcaccgctgcaatttcaccaggcgtatgggataaggctattaagccattctatgagtcattaattagcaaggttgaaatggaggagtctgctgcaaatgtagttttatcgaaagttaccagctaagttttattccgataacgattgtatcttgcaaaatgacgaaaagtagaatatcataaccctaacagtagaaatccgtgctttgttaaggtggatttaaaaaaaaggccctgcaatgatgcggggctttttgcgttttaagaacgacatttctgaaagcgccctatcaccaatcaccagaacatatccagatacccttgctcattcgtggcgactgggtagggcgttttacacaaaagaaaacccagcactatggctgggcttcgtgaggatgggggcaagaggttgcgctaacaacctcctgccgttttgcccgtgcatatcggtcacgaacaaatctgattactaaacacagtagcctggatttgttctatcagtaatcgaccttattcctaattaaatagagcaaatcccctcaatgaaggggtagagcatgtaccgtatggacaaaatcagagaatggttcagttacagcttcggaggactgactgcgatgggtggcattctctccctgaatgactgggctgtcatcattggtattctttgtactgtcggcacatttggcatcaactggtactacaaacgcaaagagcgtgaggacagattgaatggcaatgtcaccggcactacgaaatagcgtaatggcggcgataagtggcggggctattgctatagcatctgtgttaatcactggccccggtggtaacgatggtctggaaggtgtcagatacaaaccatataaggacgtagtcggtgtgttgactgtgtgttatggccacaccggaaaagacatcatgcctggtaaaacgtataccgaagcagaatgcaaagccctcctgaataaagaccttatcactgtcgccagacaaattaacccgtacatcaaagtagatataccggaaacaacgcgcggcgctctttactcgttcgtttacaatgtgggcgcaggcaatttcagaacatcgacgcttcttcgcaaaatcaatcagggtgatatcaaaggtgcatgtgatcagctacgtcgctggacatacgctggcggtaagcaatggaaaggcctgatgactcgtcgtgaggttgagcgtgatgtctgtttgtggggtaagcaatgagcagattaacctcgattatctccgctctggttatctgcatcatcgtctgcctgtcatgggctgttaatcattatcgtgataacgccatcacctacaaagtccagcgcgacactgttactcaaaagctggcgctggcgaacgcgacaattaccgatatgcaaacgcgccagcgtgatgtagcagaacttgacgccagatacacaaaggagcttgctgatgcgaaagctgagaatgatgctcttcggcgcaagcttgataatggtggtcgggtgctcgtcaaaggaaaatgccctgtgtcatcctcagccgaaacctccagcgcctccggcatgggcaatgatgccaccgtcgaactctctccagttgctggacgaaacgttctcggtatccgggacggaatcatcagcgaccaagcagcactgagaacgcttcaggagtacatcaggacgcaatgcctgaaataatttccatcacatagaaatttgacaagtgactttcatgaaaatgcctcgtaatgccgggcttttttgtatccgcagtaaatgcgcttcacacgcgcgacttctgaacacagaacctttcaggatgacccttgaggatgccggtttggtgatcggtacctttctgtgggccggaatcctgtgtgacaaggttcatcacttaaaggtgatcactgatgaagtacccaacagttatggtcaatggtgtgtccgttcgtgttgatgaggacggacgctacaacttaaacgatctccatgcagcagcagttgcaaatggagaggctacagagcaacagcgcccaagcaagtttttgtgtagcgcgcagataaaacgcttcataaaagcactagaggccaaagtgcaaaaaagcactttgaaacaaattcaaccacttaaaatcattaaaggtggtaccgaacctggtgtgtggggcgttgaactactggcaatcagatatgcagcatggattaagccggaatttgaaatcgaggtttatgaagtttttaaaacgattgtccgtctcggcgttggtgccatgtctcgcctgaacaaaattgaccacatcatcagcactgaaaccaaagcgataagccagtgtgcaagtcaaatggctaagtggggcgttggtgggcgaacaagattgcttcatgttgcacgtgagagagcagcaaatgaagtgcaaatgtatttgcccggaatggtgtgattctgctggttaatccagtttgtacattacggcagtaccgcgaaacaacccaagccagtaagtggggaaataacactggcagccactgaaagatgaacctccagccttatggcaaaaaagattctttgtggtggcggactgatggaaagacatcggttattgcagaggccattcaatgagtggtctagacaatggcttatcccaacaaccggagccaacacaatggcagagattacagcattgacagaattacagcagatgaacctcgatatcctccgtttagttcaaagcgataccgcagcagcagagaaagcgatcgcattcgttgctggaagtaagctgaacttcgaactgttcaaagaccaactggttttggcgcagggtgaaggaacggcattagctcgcgcagaaaaggctattcgtgaggcaaaagaagcgttagacctgttcactgccggagcataacgaatggcaaagacgaagtggcctaaacttccccggttcttcgtgccattgttccatagcgccaatgtctacctgtgtcgttcaaaggaagagtgggatcaggcttgcattcatcttggagttggtagcggcgggaatgagatgctggcgggggcaacacagtcatattgcaataccgaaacaggcgagaatctttacctgcttggtgtattcaatggtgaggcggccacattggttcatgaatgcgctcacgttgcattttatgtctgccgagatgttggtgtaaccacttatcctggcgacgcaaacgaaacctactgctacatgcttgacagaatgttcagtcacttcctgccgttctttcatgaaccagaaaaagaaggagccaagtaatggcaaacccaaacttcacgccatcatggcctctatacaaagatgctgacggtgtatatgtgtctgcgcttccgattaaagctatcaaatacgctaatgacggaagtgcaaacgcagaattcgacggcccgtatgctgaccagtacatgtcagcgcaaacagtagccgtattcaagccggaggttggcggatatctgttccggagccagtacggcgagctgctctatatgagcaagacagcatttgaagctaactacacttctgcaagcggttcagtagctaatgcagagacggcggataagttatctactgcccgcactatcacactaaccggagcggtcacaggttcagcgtcctttgatggttcggctaacgtgactatcgaaacaacatcaggaagttaacttatggcagcaccaaagggcaaccgattctgggaggcccgcagtagccatgggcgtaacccgaaattcgagtcgcctgaggcgctgtgggctgcttgttgtgaatacttcgagtgggtggaggctaacccactatgggagatgaaggctttctcatatcaaggagaagttacacaagagcctattgccaagatgagggcgatgaccatcactgggctaacgctattcctcgatgtgacgcttgagacatggcgacaatacagggtgagagaagacttatctgaggtcgttacgcgagcagagcaaatcatctacgaccagaaattctccggcgcagccgctgatcttctcaacgctaacatcatcgcccgcgatttgggcctcaaagagcagtcgcaatttgaagacgtgacacctgataagggagatcgcgataagcgccgctctcgtatcaaggagctattcaaccgtggaactggacgcgattcttgataacctgagcgacgaagagcaaatcgaattgctcgagctactcgaagaagaagagaactaccgaaatacacacttgctatatgagtttacgccatacagcaaacagcgtgagttcatcgacgcaggtcatgattatccagagcgatgttttatggctggtaaccagcttggtaagtcatttactggcgctgctgaagtcgcgtttcaccttaccgggcgatacccgggaacgaaaggttatccggctgatggtaaatatggcggagagtggaaaggtaagcgtttctatgagccagttgtcttctgggttggcggtgaaacaaacgagactgtaaccaaaacgactcaacgcatcctgtgcgggcgtatcgaagagaatgatgaacctggctatgggtcaatcccgaaagaggacatcattagctggaagaagtctccgttcttccctaatcttgttgatcaccttcttgttaagcaccacacgccagaaggcgtcgaagatggcatctcaatatgctactttaagccttactcacagggccgcgcccgctggcagggcgacacaattcacggcgtctggtttgacgaagagccgccatatagcatctatggcgaaggtcttacccgtacaaacaaatacgggcaattctcaattctgacgtttaccccgctgatggggatgtctgacgttgttaccaagttcctgaagaatcccagtaagtcgcagaaagtggtcaacatgaccatctatgatgctgagcactacaccgacgagcagaaagagcaaatcatagcatcctatcctgagcatgagagagaggcacgtgctcgtggtattcctacgatgggtagcggtcgaatattccagataccggaagagacgattaagtgccagccgtttgagtgtcccgatcacttctatgttatcgacgctcaggacttcggctggaaccacccgcaagctcacattcagctttggtgggacaaagacgcagatgttttctatctggcgcgtgtatggaagaaatcagagaacactgccgttcaggcatggggtgctgttaagtcgtgggctaacaaaatacctgtcgcgtggcctcatgacggtcaccaacacgaaaagggcggtggtgagcaacttaaaacccaatatgcggatgccgggttctctatgcttcccgatcacgcaacgttcccggatggcggtaactcagtagagtcaggcattagtgaacttcgtgacctgatgcttgaaggaagattcaaagcattcaatacatgcgaaccattttttgaagagttccgcctatatcatcgcgatgagaacggcaagattgtcaagaccaacgatgatgtgctcgatgctactcgctacggctacatgatgcgccgcttcgccaggatgatgcgcgatatcagaaagccgaaagaaaagaaaatccccgcaccgattagaccagtacgcagaggacgataatggccgacaatgaaaacaggctggagagtatcctgtcgcgctttgatgcggactggacagccagcgatgaagccagaagggaggccaagaatgatctcttcttctcccgcgtatctcagtgggatgactggctatcacaatacacaaccctgcagtatcgcgggcagttcgatgttgtacgtccagtggtgcgcaagctcgtttctgagatgcgtcagaaccctattgatgttctgtatcgtccaaaggatggagcaagtcctgacgccgctgatgtgctgatgggcatgtatcgcaccgacatgcggcacaatacggcgaaaattgctgtcaacatagccgttcgtgagcagattgaagcaggcgtgggtgcgtggcgtctggtcactgattacgaagaccaaagcccgacgagtaacaatcaggttattcgtcgagagcctatccatagtgcctgctcccatgttatctgggacagcaacagcaaactgatggacaagtctgacgcccgtcactgcacagttatccactcaatgagccagaatggctgggatgatttcgcagaaaaatacgacctcgatgctgataatattccatcattccagaaccccaacgattgggtatttccatggctgacgcaggacacaattcagatcgctgagttttacgaagtggtcgagaagaaagagacggcgtttatctaccaagacccggttacgggtgagccggtaagctactttaagcgcgatattaaagacgtcatcgacgacctggctgatagtggatttatcaaaattgcagagcgccagattaagcgtcgccgggtatacaaatctattatcacctgcaccgcagtactgaaagataagcaactcattgctggagaacatatccccattgttccggtattcggagagtggggcttcgttgaagataaagaagtgtatgagggggtcgtccgcctgacaaaagacggtcagcgtctgcgcaacatgattatgtcgttcaacgccgacatcgtggcccgcaccccaaagaagaagcctttcttctggcctgagcagattgcaggctttgagcatatgtatgacggtaacgacgattacccatactacctgctcaatcgcacggatgagaacaacggagaaatgccaactcagccgctggcatattacgaaaacccggaggtcccgcaagccaacgcctacatgctggaagcagccaccgcggcagtgaaagaggtcgcgacgctaggtgttgatgcagaggcggtaaacggtggacaggtagcctacgacactgttaaccagctaaacatgcgcgctgaccttgagacatacgtgtttcaggataatctggctaccgctatgcgccgtgacggtgagatttaccagtcgatagttaatgacatctacgatgttcctcgcaacgtgacaatcacccttgaggatggtagtgagaaagaggttcagctaatggctgaggttgttgaccttgccactggtgaacggcaggtactgaacgatatcagggggcgctatgagtgctacacggatgttggaccatcattccagtccatgaagcagcaaaaccgctcagaaattcttgagttgctcggcaagacgccgcagggaacgccagaatatcaactgctgttgcttcagtacttcacactgcttgatggcaaaggcgttgagatgatgcgcgattatgccaataagcagcttattcagatgggcgttaagaagccagaaacgcctgaagagcagcaatggttagtagaggcgcaacaagccaaacaaggtcaacaagacccggcaatggttcaggctcagggcgtactcctgcaggggcaggctgaactggctaaagctcagaaccagacgctgtccctgcaaatcgatgcagctaaagtcgaagcgcagaaccagcttaacgctgccagaatcgcagaaatcttcaacaacatggacctcagtaaacaatctgagtttagagagttccttaaaaccgttgcttcattccagcaggaccgcagcgaagacgctcgcgcaaatgctgagttactccttaaaggcaatgaacagacgcacaagcagcgaatggacattgccaacatcctgcaatcgcagagacaaaatcaaccttccggcagtgtagccgagacacctcaataagagagagttaatcatggaaccaaccaccgaaattcaggcaactgaagacttaaccctgtccggcgatcatgcagcggcatctgctgatagcttagttgtcgataatgccaacgacaatgcaggtcaggaagagggctttgagattgtcctgaagtacgatgagacagcaccaaaacaagacccggcaaagaacgcagaattcgcccgccgccgcatcgagcgcaaacgacagcgcgagcttgagcagcagatggaagcagttaaatgcggagaattgccggagagtttacgggtaaaccctgaccttccacctcagccggatattaatgcctatctgtcagaagaaggcctggccaaatatgactatgacaacagccgtgcgcttgccgctttcaatgctgctaataccgaatggctaatgaaagcgcaggacgcccgcagcaatgccgtagcagaacagggccgcaagactcaggagtttacccagaaatcagcgcaatacgtcgaagctgcccgcaaacactatgacgcggcggaaaagctcaatatccctgactatcaggagaaagaagacgcatttatgcaactggttccgcctgcggttggggccgacattatgcgcctgttcccggagaagtccgccgcgctcatgtatcacctgggtgcaaacccggagaaagcccgccagttactggcgatggatgggcagtccgcgctgattgaactcactcgactatccgaacgcttaactctcaagcctcgcggtaaacaaatctcttccgctccccctgctgaccagccgattaccggtgatgtcagcgcagcaaataaagatgccattcgtaaacagatggatgcagctgcgagcaagggagatgtggaaacctaccgcaagctaaaggcaaaacttaaaggaatccgataatggctttgaacgaaggtcaaattgttacactggcggtggatgagattattgaaaccatctccgcaatcactccaatggcgcagaaagccaagaaatacaccccgcctgctgcttccatgcagcgctccagcaataccatctggatgcctgtagagcaggagtcccccactcaggagggttgggatttaactgataaagcgacagggttactggagcttaacgtcgcggtaaacatgggagagccagataacgacttcttccagttacgcgccgatgatttgcgtgatgagacagcgtatcgtcaccgaatccagtccgcagcccgcaaactggctaacaacgttgagctgaaagtcgcaaacatggccgccgagatggggtcattggttatcacttcgccggacgctatcggcactaacaccgcagacgcatggaactttgtggccgatgcagaagaactgatgttctcccgcgaacttaaccgcgacatggggacatcgtacttcttcaacccacaggactacaaaaaggcgggttatgacctgactaagcgcgatatcttcgggcgcattcctgaagaagcgtaccgcgatggcactatccagcgtcaggttgctggcttcgatgatgtcctgcgctctccgaaacttcctgtgctgaccaaatctactgcaactggcatcactgtatccggtgcgcagtccttcaagcctgtcgcatggcaactggataacgatggcaacaaagttaacgttgataaccgttttgctaccgtcaccctgtctgcaactaccggcctgaaacgcggcgacaaaatttcgtttactggcgtgaagttccttggtcagatggctaagaacgtactggcgcaggacgcgactttctccgtagttcgcgttgttgatggtactcacgttgaaatcacgccgaagcctgtagcactggatgatgtttctctttctcctgagcaacgcgcctacgctaacgttaacacctcactggctgatgcaatggcggtgaacatcctgaacgttaaggatgcccgtaccaacgtgttctgggctgatgacgccatccgtattgtgtctcagccgattcctgctaaccacgaattgtttgcaggtatgaaaactacctcattcagcatcccggatgtcggccttaacggtatcttcgctacgcagggtgatatttccaccctgtccggcctgtgccgtattgcgctgtggtacggcgtaaacgcgacacgaccggaagcaatcggtgttggcctgcctggtcagactgcgtaactaacaggggcttcggcccctttcttatttgaggtgacacatgggtgtaatgctatataagcagggtcgtggaacgaaggtatggggcaaggacgttcaggttaaagttgtcgatgacggcgacgtagaagatcaccttgccgatggttgggttaggcatccaaatgaggttccggagactaatgacgagccaatcggtgattcaggcgtggtcaagaaagacatgggtgaagtatctgatggataccacacctttaacgaactatatgcacatcgagtgcgcctgttttcaacactaatgaatgccttccgcgaaagcgcatggtggagctttcagcatcatgacggcgagcaatgggatggatgggtgttagctggcatcgacaccccagaaggcgcggtaacataccacctcccagagagtgaaattgaacatctgcctaaaggcacggaaattgagtttggcaaggaatgggacggccacacggcagatgatgtgttgaatcgtctgctaagcctgcgaccgaaagaaccggcaaccaaagaacgcaaaaagccaggaccaaagcctaaggcggaaagcgatgcagataaagactaaaggcgatctggtcagggcggcgctgcgtaagcttggtgtagcatcagatgcaactctcactgatgttgagccacagtctatgcaggatgccgtagatgaccttgaagcgatgatggctgagtggtatcaggacgggaaaggcattgttaccgggtatgtattctcagatgatgataacccgccatccgaaggtgacgaccacggtcttcgctcaagcgcaatcagcgcagtattccacaatctggcttgcagaattgctccggattatgcgcttgaggctaccgccaaaattatcgcaaccgctaaatatgggaaggagcttctctataagcagaccgccatcgccagagccaaaagagctccttacccgtcacgcatgccaacaggcagcggtaatagtttcgccaatctgaacgaatggcattatttccccggagagcagaatgccgattcaacaactccccatgatgaagggaatgggtaaagacttcaagaatgccgactacattgattacctaccaatcaatatgttggccacaccgaaagaagtactcaactcatcgggttatttacgctcattcccgggcatagcgaagcgcaacgatgtaaatggagtatcgcgcggagttgagtataacaccgctcagaacgctgtatatcgtgtttgtggcggcaagctctacaaaggtgaagccgtagtcggtgatgttgccggaagcggtcgcgtatcaatggcacatggtcgcacatcacaggcggtaggcgttaatggtcagctcatcgagtatcgctatgatggcgcggttaaaaccgtctcaaactggcctgcagacagcggattcacgcagtatgagttaggctcagtccgtgacattactcgcttacgtgggcgttatgcatggtcaaaagacggtacagattcatggtttatcactgaccttgaagatgaatcgcatcctgaccgctacagtgcagaatatcgcgcagaatcgcagcctgacgggataattggcataggttcatggcgagatttcatcgtctgctttggctcgtcgacgatagagtatttctccctgacaggcgcaaccaccgttggcgctgcgttgtatgtcgcgcagccatcgttaatggtacagaaggggattgccggaacatactgtaaaacgccattcgctgattcatatgcattcatcagtcacccggctactggcgcaccttccgtctacatcatcgggtcagggcaggcttcaccaattgcgacggccagtattgagaagattatccgctcatacacagctgaagaactggcgactggtgtaatggagactttgcgcttcgattctcatgagcttctgattattcatctccctcgtcatgttctggtttacgacgcatcgtcaagtcagaacggaccgcaatggtgtgtgctgaaaacagggctttacgatgatgtatatcgtgctgtcgacttcatgtatgaaggcaaccagataacgtgcggcgataaatcagaagcgttgacaggacaattgcaattcgacatcagcagccaatacggactacagcaagaacacctgttgtttacccccctcttcaaagcggacaatgccagatgcttcgacctcgaagttgaatcatccactggtgttgctcaatatgctgaccgcctgtttctgtctgcaaccacggacggaatcaattacggtcgcgaacagatgattgaacaaaatgagccgtttgtgtacgacaagcgtgttatctggaaacgtgttgggcgcattcgtcgattaatcggattcaaactgcgggtaatcaccaaatcaccagtaacactatccgggtgtcaaattcgtctggagtaacatatggcagacccgtcacttaataagcctgtcattattcaggccactcgtcttgatgcctcaatcctcccccgcaacgtcttcagccagtcttatctgctctacgtaatcgcgcagggggctgacgttggcgctattgcgggaaaggcaaacgaagcagggcaaggtgcctatgacgcgcaggtaaagaacgatgagcaggatgttgagcttgcagaccacgaagcgaaaattcagcagttacgcatcgacgtagacgaccatgaaatccgtattactgcaaataccaatgcaattgcggcgctggatgtcagactaaccacggctgaaggagaaatagtcaccttgcaggctgatgtcagtgctcttgatggtagagtgacgacggctgaaggaaatatttctgcattgcaggttgattacgtatcgaaaacagctaccgcaacacaatcgctggcgtcacctctcaacgtgacaacgtcctattcagttggcggtactaaagttatcggtgctcgacagaccggatggacagcagcaacaggcgctgcgcttctcggtgcattcaacgctaaccaggcatacacggtcagtgccacatatacgcagtctgaggtatcagctctggctaccggattgcagcaggcgcgacagcgtatcaaagctctcgaagatgcaatacgaactcatggattaatcaactgatgattacattcattccaacacgcaacatcgacctgatagaaacggtcggcaatcatcccgacatcatcgccgggagtaacaacggtgacggatacgactacaaacctgagtgccgctatttcgaagtgaacgtacatggtcagttcggtggcatcgtgtattacaacgagattcagccgctgacctttgactgccacgccatgtacctgcctgagattcgcggattcagtaaggaaatcgggctgacgttctggcgatatattcttaccaataccaccgttcagtgcgttacatcatttgctgcacgcaaatttcgccacggtcagatgtactgcgcaatgattggtcttaagcgtgtaggaaccatcaagaaatacttcaaaggcgtggatgacgtgacgttttacagcgccacacgcgaagaactaatcgacttcctgaatcacgggagataaacatgttatatgcatttacgctgggcagaaaactgcgcggtgaggaaccttattatcctgaaaaaggcggaaaaggtggcgcagataaaagcgcaaagtatgcagcagaagcgcaaaagtatgccgcagacctgcaaaaccagcagttcaacaccatcatgaacaacctgaagccgtttactcctctggcagataagtatatcggcagtcttgaaggtttatcgtctctcgaaggtcaggggcaggcgcttaataattactataactcccaacaataccaggactttgtggggcaggctcgctatcagaatctggcagcggcagaagcaacaggtggccttggttctacagcgaccagtaaccagcttgcagcaatcgccccaacacttggtcagcaatggctgtcaggtcagatgaataactatcagaaccttgcaaatattggtcttggtgcgcttcaggggcaggcaaacgccggacagacatatgccaacaatatgagccagatttcacagcaaagcgcggctcttgcagcggcaaatgccaacagaccatcagcaatgcaatctgctattggcggaggtgcgtctggtgctattgctggggctggacttgcgaaattaattggttcatcaactccgtggggggctgcgatcggcggcggtcttggtctgcttggctcgttgttttaaggggtaatcaatggctacgtggcaacagggtattaattctggtggttttctggctggcattggtgcgcaaaatgagaacgcgccaaaggcaagcgacattaacgcaacgcttggactgattcgcgaaaacaatgagttggcccgttcaggcgctaataatgtggctttaacagggctgcgtggtctggctggagttgctgatatttataaccaggaacagcaacagaaagcgctaaacgcattcaatcaggttcatgccaacgcatgggctactggcgacaattcaggactcatcaagttcgcgcaggaaaacccggcgtttgttgcacaggcacaacaggcgttttccggtcttaatgagcagcagcgtaacgatatgggcgatttagccatgaaggctaacgtcgctctttctcaggggccggaagcctacagtaaattcattactgataacaaggacaggttaaaccgtgttggcgctaatccagactggatgatccagactggagtacagaatccagaacagctatcacacatgttgactacgatgtctctcggtgcgcttgggacagaaaaggcgtttgctgttcaggataagatggttggtcgccaacttgaaggagaaagaaaccagttaaccgcaagagggcaggatattagtgccgctaccgctcgaagggggcaggatattagtacccaaaactcgctacgttctgcgggcggggcggttccggcatcagtccgtgaatatcagtatttcaatagtttgtcgccagaacaacaaaaaaattatcttcgtgttcgtggcaggccggatgcaggtggggaaaatgttgtgcaattagcagacgggcgtactgttaatgtcaatggcaagctgcatggatctggcgctagtgcattttacgaaggtactgacgataacggaaatatggttcgtgtcccggcaagtgctattgcagcacctccaacgtctgcggcaagcgcacagaactacgcgatgaagaaagatatcgatgcaatcgcaaacgcagatgcttctgctctcgatttcatgactggaatgactggcggagcaggaaatccggcaattggtgcagatgttcgcagccgactcacaggcaaagaacaacgacagttatataactccgcacaacgtattcagggaagaatgcagaatcagggcgtggcagcagcaagagatatgggtgctagcggtatcaacaccattgcagaagcaaagatgtattttcagggtatgccgcaggttgactactcaagcccggaggctatgcagcagtcgattcgtgagattcaggaatacaccaacaattataacaagcagtacaacgttaatgttggtaaatcgcagtatcagcaatctcaacctgtacaggaatcacagcctgcatccaacagcaacttttcttcactatggggtgattaatggctaaggcatggaaagacgttattgcctctcaaaagtaccaggcattagcaccagagcagaaagcacaggcgcaggagcaatacttcaatgaagtagtagcaccgcaagccggaaacgatgccgaacaggctaaacaggctttctatgctgcttatccacctccaacggctcaacaaccagcaaaacaaccacatggaccggcgcagccacagcaacaaggtggcttcatgtctgaccttagcaatgctgctgcggagacggggcgtggattgcttcaggctggcgttaatctggcaaatatcccggcatcaatggctgatgcagtcgccagcgccggggcatgggctggtcagaagcttggcattggtgacggaacttatcagccatcgcctcgcgtcacgacacaaggacttgagcaggactttggcttgcaacaaggtgcgcttactccacagacgacagaaggcaaaatcttctctgaagcactgccatatttgactcctgttggggccgagagaattgcagcgcaggcatcatctattgccggtcgagttgctcagggtgcatcacgcttgttggcggagaacgctgttggttcattggctgcaaacagtgagcgtgataatccaggagcactggcaacagacttaggaactggtgttgcattaggcggggcaataaatcagttaggccgtgccgctggtgctgcttatcgtgggattcgcgggacgatcgcaccagaagcgcagcaggctattcagttcgctaatgctgctgatgttcctttgcatacaactgacgttttgcagccaaattcccgcgtcgggcgcatggcacagaccaccgctgaaaacatcccatttgctggaacaagcactatgcgagctaatcagcaagaagcgcgcagccagttggtagatgaatttgcatcacggtttggtgagtatgatccgtcaattgttattggcagcctgaaggcaaaaacatcaggaattcggaaagcagcagggaaccgtcttgagcaagttcagagcgcaatgacaggagtcaacattcagccaacgcgagcaattcagcagatagatgatgagattggaaaactgcaaaaattaggacaagttgccgacacggatacaattagcaaacttcaggcatacaggaatgaattggctaaaggtgatgttaacctggaacagttaagcagactgagaacgcagtttaggatggatgtcagaggagaaaggacacaaatgccaccgccagctgaggcggcagtgcagcgtgtatacagggcaatgacaggagacattgataactccattggccagaaccttggaaacgacactctgcgcagatacaagcaggccaatgcggtatacgcagatgaggctagtaagctccagaatacccgcttgaagaacgttctgatgaaaggggatctaactcctgaagttgtcaacaacatgttgttcagcaagaataaatcagaagttcagaatctgtaccggtcagtcggtcaggtgggacgcgctcagatgcgtaacggcatcatcggaaaggctatggagaaatcaggcggttctccggatcagttcctgcgccaggttaatttaatgtctacccagacgggaatcgcttttaaaggacgagatgctgcgtatctgaaaggactgaagaactatcttgagtcaaccaagcgtgctggtcaggcaggagtaacaacgcctacaggtcagcaaactataccgttcatcctaggtattggaacggtaactacccctgcgctggtaggtgttggtggcgggtatggtttgctggcaagaatgtatgagagtgaaccagcacgtaatgcaatgcttcgcctggctaatactccacgtggttctaccgcattcgagaaagcgttagccgaagttgagcgggctgttaactctgttgctcaaggtgctaaatcagatgcattaagcgaatagcagtctaccaactacgatgccgaagataaggaatgcaaagttcaataagtctctgttcataaatcctcgtaggaaccaatagagatcattctttgatctatatattatctgaatcccttacttaattgggtgatgataatgaaaaaaggtgtgatggttggctgtttttgtgtatttctcgctgggtgcgctacagcaacaaaaacgtatgctccagatggaagagaggcatataccatagaatgctctggagtaggtggttcatgggctatgtgtcaggccaaggccggagatctttgtggttcaaaaggctatgacctgattagcactggtagtgatcagggagctattgcaaacattgacggaagtactggcaacgcatttgcaacaaacaccatatcaagaagcatgtatatagcttgcaaaaaatgagtaaagcccggttcgccgggctatttttttcgatagaaatctttcaacttttcgaatactaattcttgaatttctctggatacgatgtctgcttcgcgttcagcatcatccctgtatccgattacaggcgtaggcttttcaagtgaatcagccactatctgcactagctctgcatttagtgaccttccgtttgcctttgccctctgcttaaccttttctttcagctcgtagggtagcctgaggttaaattgcgggtcatctcttcccatttctgatgcctcacttttgtaagtggatcagcatcatatgatctactggttgtatccacaataagaccaccgtggtcttaatgacgcattgccgtagccacgctgcgacgattactttcatctggagcacattaaatgacagatatcactgcaaacgtagttgtttctaaccctcgtcccgtcttcactgaatcccgttcgtttaaagctgttgcgaatgggaaaatttacattggtcagattgataccgatcctgttaatcctgccaatcagatacccgtatacattgaaaatgaggatggctctcacgtccagattgctcagccgctaattatcaacgcagccggtaaaatcgtatacaacggccaactggtgaaaattgtcaccgttcagggtcatagcatggctatctatgatgccaatggttctcaggttgactatattgctaacgtattgaagtacgatccagatcaatattcaatagaagctgataaaaaatttaagtattcagtaaaattatcagattatccaacattgcaggatgcagcatctgctgcggttgatggccttcttatcgatgttgattatcatttttataatggagagaaagttgattttggtggtaaggttctgactatagaatgtaaagctaagtttataggagatggaaatcttatttttacgaaattaggcaaaggttcccgcattgccggggtttttatggaaagcactacaacaccatgggttatcaagccttggacggatgacaatcagtggctaacggatgccgcagcggtcgttgccactttaaaacaatcgaaaaccgatgggtatcagccaaccgtaagcgattacgttaaattcccaggaatagaaacgttactcccacctaatgcaaaagggcaaaacataacgtctacgttagaaattagagaatgtataggggtcgaagttcatcgggctagcggtctaatggctggttttttgtttagagggtgtcacttctgcaagatggtagacgccaataatccaagcggaggtaaagatggcattataaccttcgaaaaccttagcggcgattggggtaagggtaactatgtcattggcggacgaaccagctatggatcagtaagtagcgcccaatttttacgtaataatggtggctttgaacgtgatggtggagttattgggtttacttcatatcgcgctggggagagtggtgttaaaacttggcaaggtactgtgggctcgacaacctctcgcaactataatctgcaattccgcgactcggtcgttatttaccccgtatgggacggattcgatttaggtgctgacactgacatgaatccggagttggacaggcctggggactaccctataacccaatacccactgcatcagttacccctaaatcacctgattgataatcttctggttcgcggggcgttaggtgtaggttttggtatggatggtaagggcatgtatgtgtctaatattaccgtagaagattgcgctggctctggcgcgtacctactcacccatgaatcagtatttaccaatatagccataattgataccaatactaaggatttccaggctaatcagatttatatatctggggcttgccgtgtgaacggtttacgtttaattgggatccgctcaaccgatgggcagggtctaaccatagacgcccctaactctaccgtaagcggtatcaccgggatggtagacccctctagaattaatgttgctaatttggcagaagaagggttaggtaatatccgcgctaatagtttcggctatgatagcgcagcgattaaactgcggattcataagttatcaaagaccttagatagcggagcattgtactcccacattaacggggggcccggttctggctcagcgtggactcaacttactgctatttcaggtaacacacctgacgctgtatcattaaaagttaaccacaaagattgcaggggggcagagataccatttgtccctgacatcgcgtcagatgattttataaaggattcctcatgttttttgccatattgggaaaataattctacttctttaaaggctttagtgaaaaaacccaatggagaattagttagattaaccttagcaacactttagatatgtaataaaaatgggtgtaaacacccatttttattttatggtaaatgttctatagctaattaaacctaacaactatggtttcccctacaacaccaatatcgtatacgttattaccagattttttccacccattttcaagtttcacctctttgtcatatagtctgtaatttctggagaacacatttctttgcattaacacctctgaccacatccaattattgttaataatgcgtggtattaactctctcattaaaggatgctttattactatgttttcatttattgatgcatacggttctgtgccaatgaattttatatttttcttgtctcttccaaatccaagatgatctatgtcttgagatattctatttacaatgctttcctcaagctgaaactgtgcatttatggcattgtaagcaccataagaaaatattgttgatattaaaagaataaaagaaaaatatattcttgatattaactgcttatcttcaaaagcatagaatacgcataggcaacaaaaaaacataaagccacccataccaatcaataccctcggtgcgtatattggtgattttagaaaaatcattggtccaatgatgaaaaacattgatgccaataaaattaaaactactagcaagaactttgttttcttattttcatctcttttgattacttttaaaactatgactatcaaagaaatgattagcgcaaagaatagcgagtagtagattaagtaattatcgccattcaagatcgtgctaaacattctataaaatgataagacgttagaaattatcccttcaaataaacttgagtttatctctataatcttactatgttcgatattgtaagaacctgttacaagtctttttgcaataaagtaagaataggcaaaatatcctactattaaaccagcgacagaagatgctgtattttttgtgatatttgaaattgagtttttcttaaccacatctgaaattataaaggccaacaagaatattgcgtaagtattcagcgcagcctgataaagactaaggaatgcaatggttaaaatggatgatattatgatatttataggcttgtattgataagcgacatacgatgagataatagatattgccacactcatgcacattgttaatgaatcatatctatatgatagattttcaataaagaatgggtttgccaaaatcatcataaaacaaagagatgctgtgatgtagtcatctccaaacagcttttccctgatgcaggatagtgccaatgctaaaataactatccctagcattaaaggtagcggagaagcatctataattggggttccaaaattaatgatatagaaaataaagtcggaaagtgggcgaccattgcctgaccaacccaacccgccatataaagacctacccaagtcatcaacgaaaaatgattgatgtgtcaataaaggaaatgtatatataatcgccaatccaagaaagattgatataaatatcctgtcattactattaaatttcacttttaaaacccttacgctttaatatgtatttaggccgctgtttggtttctatgtaaattctaccaatatattctccaagaatacctattcctatcaattgaacgccacccaggaaaagaacagaaacaagaagagacgggtagccaggaacattatttccaaatattaatttatcaataatcatccatgcaccgtaaaggaatgacatacctgcaataaacaatccaatgtaagtccatatgcggagcggaaatgttgagaaagaagttattccctccagcgccaggttccataatttccagccgttgaatttcgaatcaccggccacgcgttcggcacgggcatatttaacaacatccgtttttccgccaacccaactgagcacacccttcataaacaagttgcgttctggcatttgtttgatgttctcgacaaccgcacggctcattaaccgaaagtcgccaacattttcttcgatttttggattgctgattttattgtgcagcttataaaaccactcagctgtcttacgcttcaacctcccatcagttgagcggtctgagcgcttagccagcaccatatccgcgccagcctgccacttctcaatgagatgagggataacttctatcggatcctgtaaatcgacatcaataggaatgaccgcatctccggttgcatggtcgagacccgcgaaaagagcaggttctttaccgaagtttcgcgtaaacgaaagcggaataacgagcggatcagatgcggctattttgttaattattgattcagtcgcatctttactaccatcattaataaaaacgatctcaatttcatattcttttagctcattaaactcacgtaccgttttatagaaaatcggtatcgtgtcttcttcgttaaaaactggaacgacaagagagattttcatcttatatccctgaaaacaatgaatctggaatagataaagccgcataccaggctaattgccgagaaagtgataagggtaatcaatggtggcaaggaacattggtcagccatccagccaacaacagcgctcagtgttcccatgaatcccacatacatcatgtagcgaagcgtggtggtggtggcattaaaggtgaaacgcgcattggcatagaagctgaacgatacggcgataacaaaaccggaaaagttcgccagcgcctgatgcgtatgcatcccatacacacaaaaagcaaatacgccccaatgaataagcgtgttaagaacaccgatcgatgtgtacttagcgaataacttcaacattatgaaaatcagcggattcggaaaggtctggagtgtagcactacaaattactttgatcgatataaacgatcaataatgtaaactttgatagtttaaagttattgtttgctcgttaattgatcgttgttaccgatcaatttttattgctgattgctaagtggtttgggacaaaaacgggacacacaaagctttgcatcggcttgcaaggctttgcatgtttttcgaagatgggacgtgtgagcgcaggtatgacgcggtatgttgttgacttaaaaggtagttcttataattcgtaatgcgaaggtcgtaggttcgactcctattatcggcaccagttaaatcaaatacttacgtattattcgtgccttccttatttttactgtgggacatatttgggacagaagtaccaaaaatcgagtcaatttgtcgagcatgttcagtcaggtgatttggtgccagatgagcatatctgcgaaccatttcgatagactcccagccacccatttcctgcaataccgaaatcggaacgccagcctgaactaaccagcttgcccacgtgtgcctcaggtcatgaaaacggaagtcttcaatgcctgctcgttttaatgctgacctccatgcagtattagcgtcatagcgcatcttcctcactacaggtgatttagttccgtctggcttggtgctgctttccttgtagacgaacacccatttgtgatgattgcctatttgctttttcagcacccggcaagcagtatcattcagcgccacgccaatggcctgattggacttactttgttccgggtgtatccatgccacctttcgctgcatgtctatctgctgccaatccatattgataatgttagaccgccttaagccagtagaaagcgcaaactctacgactgactttagcggttccgggcattcatcaatcaacctttttgcctcgtgaggctcaagccagcggatacgcttatttttcggctgaggaactttgatgatcggagccttatccagcatcttccattcgcgttcagcagcccggaggagtgccttaatgaatgaaaggtgagttgcttttgtggctactgctgccggcttaggcttgaatactggaggctgcttcccattcttcctgcaagcttcatccattaacttccagttttcctcatgccgccgattagtcatcttctggatggcggagtaaatcttcgtctcggtaatatccttcaactgcatccctgcaaaatgctggagccagaatcctatccgactcttgtcatcatccagcgacttcttatgcgccttctcctctaaccacctgacacaggcctcctcaaaagtcatgtcaggcgtctctcctaatttatttaccctccatgcttctgccttcagtttgtcatgaagctctgtggcctgccttttgtcctttgtcccaagagactgcttaaatcttttgccgttcggcaatgtgaaactggcgtaccaggtttcacctctgcggaatagtgacatttcagttcctctgttatgtcatcacccgcgctcacctggacagtatgcagcggagattgaagtgccgcaacgcaggcttgtcgtgtggtgaggtaaggggatttaggtttggaagggtctttgcgtgttgcctgaaggcggcctgtgcgaatccagtttgtagcggtaggtctggatatcttgagaaatgcacaggcctcatcgagtgtgaggctgtgtgattccatagttactttcctaatactgaagcgagaagagcaatctctacaagaagctcaataaatccaaaaattgctatacctgcgtaaaccgcgccatcaatatccccgcggcgacaaagataggtggcactgatcacaagaatcatcattcactccataaaacaaaactcgccgtagcgagctcagataaaagaaatccccgcgagtgcgaggattgttattcattgccgatattcatctttatcgcgaacacctttaccggtttatcgccgaagtgcggatgtgtgattgtcttgatttcatatccgtcatacgggacgtcaattctgcggctggaatcgtcgcgcttcggatatccctttgtgataatcaggcggtcatactcccggaacataattcgcttattccagtagtcattacacaggcgatactcttccgttttctctccgcgaatcatggcatcgaagtattcacctttgacggcaagttgcaggttagccacgaccttcctcctttggcttgtgaatttgtatcgtcatgccgctttgagtggtgactacaacgacagaaccaggctgaaggctgttaagattgaatgcttcgtaaaacgaatccaatgccagtgcttttttattctttcggttccaccaacgccatcccttgctacaggctacactgacaatccactgtccactcctgtaagccatataaaaccagatgagcaaaacctgaaggaaggctatccagtcaataatcgtatatttcgcgaaggggtccatcacttcacctcctgcggtggctccggtagcggcatccagtgtgacggctcacataccccctcaacaccgttcatgtaaaagaattgaaataaccctttacctttgtgaaaccctaccatctgctcttttgtgtctgaacaataaaccaaaacatcttcttcgtttggcattcgctcactacagcttatccaaccatccggagttgccggatagctgcccgatagctcgttcaacttgtaagtttggcttacgggttcggcttccagttccgctatgcgcttttttgctgcttcaagctcaaagcgcagcttacctaccgtaagcgcaatatcctcgttctcctggtcgcggcgtttgatgtattgctggtttctttcccgttcatccagcagtgccagcacagtagccggattggctgcagcgatgaattcagcattggcctgctgttccatttggaaatcttcatcgaaaccgctttcaggatgcgctccttcaattctgcaaatgggaagatatccaacaacttcacgatgaattagcgcatcaccagcatcaaatctctcctctccatattcgagcgaccacacaccacacgttgctttctctgccttttcacgcagtgcctgatagtcaatcttgctcactggttgcctcctttgctcgctgattccactctgctctaacctctgaataaaaaatcgcgcagtcatttccaggcgccgcatatttgctaccagattgagcgcgacacgtaccgcatcgaacgaaatagaatcgaccgccagagccatattcagggtgatctgcttcgctggcaacgtgcgccgcgccgccacagaatggacatggtagtaggttggtcatgaatgcactcccttgcgaagttggtctgcacaatgcagcagggcgtccgtcgcttctttcaccgtaacgatgtcgccatcgtccagcccgacaaccgtagcgtccttaacgaacgccgagcaaaggtcattaaacgcctgcgcacgcacttcatccaggaaagcgtcggtggctggggtatcagtgaaatcgtccacccacgtatctccaacgtcctcgcactcgcgacgacaatattcgttgaattcgacctctgattttttcagtgccgcattctccgaagccagcgccgaaaacttctcgtgtgccaacttaacagccgaatcagcctgcttaattgactcaatcgctctctggtggtcttcggccagcgcggaaatcttggcctccgcttcagcaaatttacgcaccagatattcagcgtttgtttcgttaacctttaaatctcgtgggatgcatttacctttcagaaatccatccatctcaattagtgtcatttgtttcatttcttcccactccgccacatcgcattcagatatttgttttgattcactgatggaaaactctttctcgccagcatttcttcgcgtggaatatcgttgatgggcttgaagcggtgtcgaataatcatttccgatggaaggattccttggtcgtaggacaaacctctcatgatgaatccctcagttattgctgatagcgccgtaacgcgaacggtaatttttaaggcgcgggtctatttcaatgaatttggtgtaagtggcttttcggaatggtcggattgctgtttcgtttattcggtctttttcctgtttttctgcgagttgtatatcgcgtcggtacttccgttctgcttttgtttccggtggcagagcaagaaacgcgtcgagattgtttttgatattttccagcacctccgacttggagctaccggagcagttgcgcgggtcatccgcaccatatagaggtgcaggcataatttactccagggtaggttatccgaataatgtggtacgtatagggttatttctttcgtaaacgtgatagcctgctttttaccgactcttcacttcgcccgagaatttttgctacatttctttgtgtatagcctgatgagataagcgtctgcattcttttgtcttcgtcgtcgctccatcttggcttaacgaatgccgtttttaatgacagtttttttgctatgtaataaaactgatttatgtttaggcccagatgttctgctgcacggcaagctaccatgcgaccgcaaactgactccatctcagctggagttatgtttaatcttctcattaagccacctgtttaagctcatttattctgatattcattacctgaacgcattttgtctgcgcatcatcgtgaccagccaataattgccagtcatgctgatatctctcaattagctttttcttgtcagtttctgttgctgcataatcgctgaagtctttcaggatttgttcgcagtcaaccgatggagatttctggttggtattttctggtgatggttgattgcatgatgctggcatggcccagtccggcagcgatggagggagccagtaaaatcctgttccatccttcagttttgccctgtgccatccttgtttcttatctctggatatctgcgcaaatccttcctcaagattatacagataccgtcctattccccactgaacggctgcgcgcttcattgctcctgaacgaccgcctttgacggcttctacctgcgtgttttcagcggcatcccatttagttacccattcggaatcaatcttgattgatattccgcattcaacgccgccattgtttggaatatcgcgatattcattgcgccatccggcctttccgcaaacatcgtccaggcgtttcatgattgccctgttcgtgacataagccagcaccatagcccataacttcccatcgcgtgttttcccgctttgctgtattcgccactcaatatcttcagcagcgaacggttcatctaacagatccagattcatgagtaataccccgcaaattcatcccagctaataatcggattctgccgttctgcggctaagttaatttgctgctccacttcttcctcaatttcaggaggaatgagggcaataaactcgttatcatcaaaatcatgcaacatgacgcgcctcccattcttcgtcctgccacttatcccaaccaagagctattcctgcagcccatgtatacgcatcagacattccctgttttgtatccggaaatactttctcatatagcttgttgaactccctgtttccttgctgaacaagaattgttccgttaacaggcgtaatggtcatggcgtggtactcctggctgattaagaatttcaccgagacgtttccatccggcccgtaattttctggtgatacgctctaaaagtgattcattaagttgggcgatacccatgacggcaccgcccgcgatagcaaatgtcatcgtgggactctccattttcatttattggcatagctaaaacgcctcgatatgaagcgctgtggatatgcgataaaacagccgcactcaggcggctgttgttgtttcttctttcaggctttcgatatattcacgcgggtcgtcgtaacactggcattcgctataccaatccacccagcgatccgtaagctccatttcttccaaatcctggtcagtaaggctctcatcccacatctcaaggccgttagcgttgcagtaatcaggtttgatgttgttgtcatactgaaatgcgtcataatcagccagtgcatccatcactcgcacaccctcttcaacacttgctacttctacaatgaatggcttcataggaacttgcgggatatgccagacacgtaatttcatatttcccccaggtaaaaagaatgccgcccatatagagcggcaaataacatcaagggatgatttttcgattaaccagaacgagtcgtcgtcctcgtttggttacgagcgatattgctcacaatgaccactattaaaatggtcattaggtgcttattcgctgacaaatttggtaagactttcgtgtagcgaaaccagaatttcatcatcaaacccatcaagtaatgcttgttcgataagttttataatttctgatgcctgctctttatttatttccatcactcctccccaagagccttgctgatggctgcgcgagctttattgattaccccgtaccactccggataagtcacattgcgtccttctgccatcgctttttcagccaattgaagagcctcgagcaaa

SEQ ID NO: 3 - DNA, 41424 bp, unidentified
  source 1..41424: mol_type = unassigned DNA
  misc_feature 1..41424: note = the genomic sequence of a bacteriophage
cgcaggttggcaccgtacaggtcggcaccgtacaggttggcaccgcgcaggttggcaccgtacaggttggcaccgcgcaggttggcaccgtacaggttggcaccgcacaggttggcaccgtacaggttggcaccgtacaggttggcaccgcgcaggttggcaccgtacaggtcggcaccgcacaggtcggcatcgcgcaggtcggcaccgcgcaggttggcaccgtacaggtcggcaccgtacaggttggctctagatccgctctcacgcattgaggtaatccacactttgtgttcttcaagaatcttcgataaatctgctgaattcatgttgttattccttaaattttggcaataaaaaaggccgcattgcgacctgattagatatttgaagtgagataaaagaaggccaactatgtagactttagtttttccagctctctggcaatcattgccgtggttctgattgcccatttatcgacaatctttccatcttctctcaccagagccatttcctcaggcttcaccatacattcagcatcaagcttgcagcctttgcatttcacaaaacgactacaccattgatttgtatcaatagtcgtagtcatatgggtagtcctggtattgttccatcacatcctgaggatgctcttcgaactcttcaaattcttcttccatatctcatctcaaatagtggattgcggtagtaaagattgtgcctgtcttttaaccacgtcaggctcggtggttctcgtgtacccctacagcgagaaatcggataaactctattcacccctacagagagcaaaagagaatcgccgatgaacaactcatggtggcaggagctaatgcgttttttcctgcaaggaatgacacttaaacagttgattcatatgatcatcatcctgattttactgattgtcgttatgccggtaagcgtgaaagaatgggtaaacctgcataatccagaaatccttcctcagtactggatgtattacatcctgctgttctgtgttagctatgtgctgaatggtgttgttaattctgtttatcatgtcgtgaatgaaagaattgaggcatcaactgctcagcagcgtaaggccagagaagaaaaagtcgttcgggatttgtttgattcgttaactcttggagaaagagcgtatttggcattcgctgtagccgctaataaccagctaaagacagaaaagggaagccctgaagcaatttcattgctcgaaaaagggcttcttattcggataccttctgctactggatatcctgataccgaccgttttgttatcccggaaagctatagaaatgagtgctacattaggtttgccggggagtcagacattcttatgaatgaacttattgcacaggacgagcaggccaaaaaaataacgacttaaccgacaaatgttttacctcgctgttatttgtttgctcttacgataccctgccgcgtaaagtgctacgtctggaagaagtacagatcctccttcaacttccttctgacgcgttccggcaagcgaaatggctttggtaacgcggtcaattcttttggctttaacctcatgagaagcatcaggagcatcgcagccaaaaattgaatcaatgatattgcagatggtgtcgcgctccattgcgagctttctgcgccgctcatgacggcgagttttagcattgcctgcaaacgttgacttcccgtaggtgataaccgtcatgatttaatcctcatgtgaaatagctttggtgttgcagatagccaggcgactaaccctgaccgcgtactcattgccgagcgcctccgccgaagaggttggcttctacctgcaacccaaacccatctcgtttggtatttgttcgcgctttgtcagcgcatcatcgaagttaaagagcgttgcctttccgtttggctaccagcgtcctgctgatggctaaacaatagcattgagtattatccatatcaatacgttttgctattaattagtggtttttggtattatgttgttgatagcaaaatgaatttatttttataaatcctctatgccatactgttctgaacaaaaaacgagcgaggaatcagtgtgaaaagtgaggaagagttctttgcggagcttcacccgcaggtggttgaggttctcggtacagcgctgatgcaggtactggtagagcagcgcgaaccttcgcgtgaagctttgatagaaatgattcaggtactgtggcaggaagaggatgtggacttggctgtagaactggctattgatgttctgacgctgccgaaagagtagggcaaagaaaacccggcgcggtggccgggcgtgatcgcttactcatcttcatctagcaactcaaattgagtcccgggcgatggaaaggctcttttgaatgctctgtcaaactcagctttatttcttgagcttgaaaggatgccaactacctgccaaaggtgcgccctaaacatcggaactccgatgctatcggttaggaactgaaacatcttatatcttctaccgccattcgcataaacgacagggtttttttcatctagcatctcaaggatggcgcctttacttgatgctaatggttcgtagatatacttcctcgtaaacttaccgaaaaactgagggtgccgacctgcttttttctgcgtaagtccgtaaagtcgataaaggccatccgtgaactgcttcggaaattccttctcatattctctgacctgctctttgatgaactcttgaaagagaattcgatattcatcttgtctcttttcatcgatatgcccagtagcttcgtctaccagcgctacaataccaacctctgcaagaccgcgcatgataatgtctgcctgaacagaaataggtatctgagatgactgaagggcatcaccctgatctctcatcttcaaataaacattgcatatctttgggagcaaagatgcttcaatgccgtaagctggcgccgctcctttatttattttgaaaagacggcgccgggataggccttctgataattcattattaatgaatggcttaatgtttttagctgacaagaaaacaggaagataggcgccatctggattctctttcattctcttccagtgggagcctccacgcttcccgccgaaggctttagtgatagctctctctgacagaaccctcgtcccatcctcaagcacggcacattgtatctttaagtctccaatgacaatgtcgccagatcttttggcaatttccacctcaccatcgccaccccacctagctgctgcggcttttcttgcaatagccgacctttcttctgcagaaagagcattagcccttgccacaccacctttggactttcccgttggttctttgctttctttatcagacattatgcaagcactctttgttgtgaaatgtgcttgcataatatcaagtatataaattaataagcaagcatatattctatcttgagtgcttgcatttttttgtaaaaaggccgcatttctgcgacctgtttcacacaatcactatcacccaaacatcccttcggtccatcatcacccgaatatctcatcaggccattggctggctaaccgtgcttcctataggtctgcggcatgcttccaattacctttccaaagacaaaaaccctattcatttcatctctttcaattgggtcccaagctgaataactcttattatcagatatgaccaatagtttatctttcatcttctggagccgcttaacatgtgcagtatcgtcatagaggaaggcgtatatcccatccccatcgaagtttttgatgcttacgtctacaaacaacagatctcctggttcaatagttcctgacatgctatctccgcgcacatttatgatgcggatattttcagcctttctaccatcgaacatgtgtctggcatcgtcctgcgaatactcaaccgagcggagtatttccacgaattctcgattgataacgccaggacccgcgctaacttcaagatctaggatatcgattttaaatgtgtttgaagatggagatgcgtttatcggagtagttccatcttttttcataggaccaattccggtagacaaccattccgaattaacacctaacgcgtttgctatttcaacaatctttgttgacccacgagcgtttccacttgtcaaacgccagatcgttggctgagcaacgcctgacgctttagcgagagcaccttgagacataccagccagttccattgccttgttgagacggtcagagagagtttcttttttcataatattcaatttatacgcttgcgtattaatggtcaaaacacgttttgctattgctttgattaatactcattgctattatttgttgtgtgttatacgaaagggaataagcaatgactaacaaagcaatacaaaaagctgttgccattgcaggaagccagcaaaaactcgcctctttgtgtggagttaagcagccaactgtatggcgttggttacatggtggcggcattgacgctaagtatgtggcagcaatcgtaaaagctacaggaggaagaattaaagccagagaacttcgtcctgatttagccgacttactggcagcaagttaagtatcaacgctctttaccaatctgaaccgccgacaacgcggtaaatctattaaacggatttgcgtgtatttgcgaatccaactctatctaatttctaaggaatattttgaatgaacgtagttgcaactaaaagcaagaaggcggctcgcatcgagtccaccttactcaacaagttagccatgatgggccagaagacattcgctaaagctatgggtgttcctgaataccaggtaagccgatggaagaacggtttcttctctcaggtcagcatgatgcttgcggttctggagtatggaatcgaagacgaggaaatggcagagctcaccaggcgacttgctacctacctgacaaaagaaaaagccccgaagaacggcgaattcttcgaggcctgatgtagaaagactggatcaatccacaggagtcattatgacaaaacgtcgtaagaaataccaggaaaaagaagagattcgacaccctgattcacctgagggattagtagtagccgcagcaaataacagggcgttcgcagagcgccttgttggtgtttacagactagccaaagcaggagtgaaacatgggcgtcgttaagttagctgattacaggcctcatctggaggtcgtggagcatcgcgtggcagataccgaagatggtttcatgcgcgttgctaacgagattaccgacagtctgctgatggctgatttaaccgtccggcagttgaaggtgatgctcgctatcatgcgcaagacatacggattcaataagccgatggatcgactcacaaacacgcagatagcagccatgacaggtattcatcacactcatgtttgcgctgctaagcgccagcttattgagcgtaaattcctcattgctgatggcgtgaaaatcggagtgaacaaggtggtttcgcagtggattagccaggacagcttaacattagctaaaacagctaataaaacattagccaagtcggctaatgggtataagccaagtcagctaaacacaaaagacaatatacaaaagacaataaatacaaatacccccttaccccctaacgggggcggcgatgggcaggttaaacctgaacgtcgcaaggcagaacgaatcgactacgaatccttcctgaacgcctacaacaccgaagtcggtgacagacttccacatgctgtttcggtcaacgagaaacggaaacgccgcctgaagaaaatcatcccgcaactgaaaacgccaaacgtggacggtttcagggcgtatgtcagggcgtttgtgcatcaggccaagccgttttacttcggagacaacgacacaggctggacggctgattttgattacctgctgagggaagattcgttaacgggagttcgggaagggaagtttgcagacagggggattgcatgagacaggatatcgaagcgagcgttatcggtggcttgctgattggtggattaacaccaaccgcgagtgacgttctggcaacgctggagcctgaagcattctcaattccgctttaccggaaagcttttgaagttattcgaaagcaggccagaaacaggaacctgattgatggactgatggtggccgaggagtgcggggatgaatacgcaacggcggtgatgatgactgcgcggtcatgtcccagcgctgcaaacctgaaaggttatgccggaatggttgtagacagttatcaacggcgtcaggttttacagctactggatgagatgcgagagccaatcagtaacggcacgctggatgcttcaggtagagcgatggacgatcttgttaagcgtctttcagccatcaggaagccacgcaacgaggttaaacctgtgcgactgggggaaattatcaatgattacactgacacgcttgacaggcgtctgaggaacggagaagagtcggataccctgaagaccggaatcgaagagcttgacgctatcaccggaggaatgaacgcagaagaccttgtgattattgctgctcgtccaggtatgggtaaaaccgaactggcgctgaagatagccgaaggcgtggcaagtcgtgttattcctggttctggcgtccggcgcggtgtgttgattttctcgatggaaatgagcgccattcaggttgttgagagagggattgccggcgcaggaatgatgtcggtcagtgtgctgcgtaacccgtcacgaatggacgatgaaggatgggcgagagttgcaagcgggatgaagttgctggcagatctggatgtgtgggtagttgacgcatcgcgtttgtctgtcgaagaaatcaggtccatttccgaacgccacaagcaggagcatcctaatctgtcactgattatggctgactatctcgggctaattgagaaaccaaaagcggaacgtaatgacctcgccatagcacatatctccggtagcctgaaagcgatggcgaaagacctgaaaactccagttatctccctaagccagctttcacgcgatgttgagaagcggccaaacaagcgcccgacaaacgcagatttgcgtgattcaggaagcattgaacaggatgcagactcaatcatcatgctttaccgtgaagcggtatacgacgagaacagtagcgccgcaccatttgctgaaatcattgtgacgaaaaaccgttttggctcgcttggtacggtttaccagcggttctgcaacggacactttgttgcatgtgaccaggatgaagccagacagatttgcacagcatcaaatgcacctgctgcgcgtggcagacgatatgcacaaggggctgacgtatgaataaaaaacaattagccattctcgaaaaggcatgggatgcacaaatatcatacgctttgaaagaacaggcactaccaataatccagaccaaatcgaaaatagccaggcagttatgcgatgacggattcctaaacgaagttgagattacgcaccagatggcaacgttcaaagggtatgagataaatcatcatggtatagcagcgtattgctcccatcttcctgatgacgttgacattgatgaaatggaaagggagatgaagcaatgaccatctacatcactgagctaataacaggcctgctggtaatcgcaggcctttttatttgggggagagggaagacatgaaaaaactaacctttgaaattcgatctccagcacatcagcaaaatgccattcacgcagtacagcaaatccttccagacccaaccaaaccaatcgtagtaaccattcaggaacgcaaccgcagcttagaccaaaatcggaagctttgggcttgcctttgtgatgtctcacgtcaggttaactggcatggacgatggcttgacgctgaaagctggaagtgtgtgtttaccgcggcattaaagcagcaggacgttgttcctaaccttgccgggaatggctttgtggtaataggccagtcaaccagcaggatgcgtgtaagcgaatttgcggagctattagagcttatacaggcattcggtacagagcgcggcgttaagtggtcagacgaagcccggttagcactggaatggaaagcgaggtttggagacgccgcatgaaacactgctaccgctgcggagaaagcaaagacgattatcgattccggccaaatcaaccttattggcaccaatggtgtatcagatgtgagcggtcgccagtaggtaatttcccgctgccagagacgaagggggacgtatggcacgacagcgacgaagtatcaccgacataatctgcgaaaactgcaaataccttccaacgaaacgctccagaaataaacgcaagccaatcccaaaagaatctgacgtaaaaacattcaactacacggctcacctgtgggatatccggtggcttagagaacgtgcgaggaaatgacaatggattattcacagttaagtgattttgaaattaaccgaatggtaggagacataatttttaaaggcctttgggcatgtaagccggaaacgtcagggaataacaccaacaaatggtattacggaaacgctgatacaacttttgagccattaaaccatttacctgattactgcaatgatccgagtgcctcatggccgattattgagaaacacaggatttctatcttagaccagttaactgaatggtgtgtggatgcaaaaggcgtaagcccaatatttgataccagacctctccgcgccgccatgattgtctttctcatgatgcaggacgccaataatgcttagtccatcccaatcccttcaataccagaaagaaagcgtcgagcgggctttaacgtgcgctaactgcggtcagaagctgcatgtgctggaagttcacgtatgtgagcactgctgcgcagaactgatgagcgatccgaatagctcaatgtacgaggaagaagacgatggctaaaccagcgcgaagacgatgcaaaaacgaagaatgtagggaatggtttcaccctgcattcgctaatcagtggtggtgctctccagagtgtggaaccaagatagcactcgagcgacgaagcaaagaacgcgaaaaagcggaaaaagcagcagagaagaaacgacgacgagaggaacagaaacagaaagataaactgaagattcgaaaactcgccttaaagccccgcagttactggattaaacaagcccaacaagccgtaaacgccctcatcagagaaagagaccgcgacttaccatgtgtctcgtgcggaacgctcacgtctgctcagtgggatgccgggcattaccggacaactgctgcggcacctcaactccgatttgatgaacgcaatattcacaagcaatgcgtggtgtgcaaccagcacaaaagcggaaatctcgttccgtatcgcgtcgaactgattaatcgcatcgggcaggaagcagtagacgaaatcgaatcaaaccataaccgccatcgctggactatcgaagaatgcaaagcgattaaggcggagtatcagcagaaacttaaagacctgcgtgacagcagaagagaggcagcatgagcaaaatccaatacccaatgaccactgcggcaattttcgatgatgttgtctatccgctgcatttcgacaatgccggcaaggtcaggcaagaaatggaaggcgctgttaactggttctgcaggtggcgcaacgaagagaaagccgttgtgaaagcgagattgttggtcagttgctggggtcaatatctgagccatgagcaggttatccgggaggccgcatgacacacactatcaaaaccattccagacatgctcattgagacatacggaaaccagacagaagtagccaggcgattgtcgtgccatcgaaacacagtcaggcgttatctgtacgacaaagaagccaggtatcacgccatcgttaacggcgttttaatgattcatcagggcgggagaggtatctatgaccgtaaccagcattaaccaggcgaaacagcagtgtgaacgtgacgaagctgaattgcgcagcgtcagagagatgacggagcaacaccagaaggcgatggattatctgcatgagcgagagcgtgaactggtgaaccggcttggattgaacaagacatcgggaggcgatgctgcatgaatttggaaaacactgtgaaattccactctccgaagtctcctcaactatcagattcaccgagagcaacggcatcagactcactgactaataccgatgtgatggcagcatttggtatggcgcaaagtcgcgctccgctcgggttcagtgctttcagcggcaagatgaacctgagcgacaacgataagcgtaaggcaattcagttactggtacagcatgggatgaagcattgcgacaaggtggctgccttacgcaaacttgataccaatgttaaagggaaagtagtgcaaacgctcgcaactttcgcgtatcaggattactgccggtcggcagctagtaatgtcatgtgttcgtgctgcaaggggcgcggagtattaaggaataagaagcggatcgttaaacatcctgggtgtggagagaaaactcctgcaaagacggctgtggaggtaacggaatcactatgcactaaatgcaatggtgcaggtgttgtatctacatcttgcgttaaatgccgtgggcgtggcgtagcgctggacaggaagaaatcagaactacagggcgctccagtttattcatcctgcaagcagtgctcagggcgtgggtatgagcgcatacctgcggcctcatgctttcgtgcgatatgtcagttcaccgctgcaatttcaccaggcgtatgggataaggctattaagccattctatgagtcattaattagcaaggttgaaatggaggagtctgctgcaaatgtagttttatcgaaagttaccagctaagttttattccgataacgattgtatcttgcaaaatgacgaaaagtagaatatcataaccctaacagtagaaatccgtgctttgttaaggtggatttaaaaaaaaggccctgcaatgatgcggggctttttgcgttttaagaacgacatttctgaaagcgccctatcaccaatcaccagaacatatccagatacccttgctcattcgtggcgactgggtagggcgttttacacaaaagaaaacccagcactatggctgggcttcgtgaggatgggggcaagaggttgcgctaacaacctcctgccgttttgcccgtgcatatcggtcacgaacaaatctgattactaaacacagtagcctggatttgttctatcagtaatcgaccttattcctaattaaatagagcaaatcccctcaatgaaggggtagagcatgtaccgtatggacaaaatcagagaatggttcagttacagcttcggaggactgactgcgatgggtggcattctctccctgaatgactgggctgtcatcattggtattctttgtactgtcggcacatttggcatcaactggtactacaaacgcaaagagcgtgaggacagattgaatggcaatgtcaccggcactacgaaatagcgtaatggcggcgataagtggcggggctattgctatagcatctgtgttaatcactggccccggtggtaacgatggtctggaaggtgtcagatacaaaccatataaggacgtagtcggtgtgttgactgtgtgttatggccacaccggaaaagacatcatgcctggtaaaacgtataccgaagcagaatgcaaagccctcctgaataaagaccttatcactgtcgccagacaaattaacccgtacatcaaagtagatataccggaaacaacgcgcggcgctctttactcgttcgtttacaatgtgggcgcaggcaatttcagaacatcgacgcttcttcgcaaaatcaatcagggtgatatcaaaggtgcatgtgatcagctacgtcgctggacatacgctggcggtaagcaatggaaaggcctgatgactcgtcgtgaggttgagcgtgatgtctgtttgtggggtaagcaatgagcagattaacctcgattatctccgctctggttatctgcatcatcgtctgcctgtcatgggctgttaatcattatcgtgataacgccatcacctacaaagtccagcgcgacactgttactcaaaagctggcgctggcgaacgcgacaattaccgatatgcaaacgcgccagcgtgatgtagcagaacttgacgccagatacacaaaggagcttgctgatgcgaaagctgagaatgatgctcttcggcgcaagcttgataatggtggtcgggtgctcgtcaaaggaaaatgccctgtgtcatcctcagccgaaacctccagcgcctccggcatgggcaatgatgccaccgtcgaactctctccagttgctggacgaaacgttctcggtatccgggacggaatcatcagcgaccaagcagcactgagaacgcttcaggagtacatcaggacgcaatgcctgaaataatttccatcacatagaaatttgacaagtgactttcatgaaaatgcctcgtaatgccgggcttttttgtatccgcagtaaatgcgcttcacacgcgcgacttctgaacacagaacctttcaggatgacccttgaggatgccggtttggtgatcggtacctttctgtgggccggaatcctgtgtgacaaggttcatcacttaaaggtgatcactgatgaagtacccaacagttatggtcaatggtgtgtccgttcgtgttgatgaggacggacgctacaacttaaacgatctccatgcagcagcagttgcaaatggagaggctacagagcaacagcgcccaagcaagtttttgtgtagcgcgcagataaaacgcttcataaaagcactagaggccaaagtgcaaaaaagcactttgaaacaaattcaaccacttaaaatcattaaaggtggtaccgaacctggtgtgtggggcgttgaactactggcaatcagatatgcagcatggattaagccggaatttgaaatcgaggtttatgaagtttttaaaacgattgtccgtctcggcgttggtgccatgtctcgcctgaacaaaattgaccacatcatcagcactgaaaccaaagcgataagccagtgtgcaagtcaaatggctaagtggggcgttggtgggcgaacaagattgcttcatgttgcacgtgagagagcagcaaatgaagtgcaaatgtatttgcccggaatggtgtgattctgctggttaatccagtttgtacattacggcagtaccgcgaaacaacccaagccagtaagtggggaaataacactggcagccactgaaagatgaacctccagccttatggcaaaaaagattctttgtggtggcggactgatggaaagacatcggttattgcagaggccattcaatgagtggtctagacaatggcttatcccaacaaccggagccaacacaatggcagagattacagcattgacagaattacagcagatgaacctcgatatcctccgtttagttcaaagcgataccgcagcagcagagaaagcgatcgcattcgttgctggaagtaagctgaacttcgaactgttcaaagaccaactggttttggcgcagggtgaaggaacggcattagctcgcgcagaaaaggctattcgtgaggcaaaagaagcgttagacctgttcactgccggagcataacgaatggcaaagacgaagtggcctaaacttccccggttcttcgtgccattgttccatagcgccaatgtctacctgtgtcgttcaaaggaagagtgggatcaggcttgcattcatcttggagttggtagcggcgggaatgagatgctggcgggggcaacacagtcatattgcaataccgaaacaggcgagaatctttacctgcttggtgtattcaatggtgaggcggccacattggttcatgaatgcgctcacgttgcattttatgtctgccgagatgttggtgtaaccacttatcctggcgacgcaaacgaaacctactgctacatgcttgacagaatgttcagtcacttcctgccgttctttcatgaaccagaaaaagaaggagccaagtaatggcaaacccaaacttcacgccatcatggcctctatacaaagatgctgacggtgtatatgtgtctgcgcttccgattaaagctatcaaatacgctaatgacggaagtgcaaacgcagaattcgacggcccgtatgctgaccagtacatgtcagcgcaaacagtagccgtattcaagccggaggttggcggatatctgttccggagccagtacggcgagctgctctatatgagcaagacagcatttgaagctaactacacttctgcaagcggttcagtagctaatgcagagacggcggataagttatctactgcccgcactatcacactaaccggagcggtcacaggttcagcgtcctttgatggttcggctaacgtgactatcgaaacaacatcaggaagttaacttatggcagcaccaaagggcaaccgattctgggaggcccgcagtagccatgggcgtaacccgaaattcgagtcgcctgaggcgctgtgggctgcttgttgtgaatacttcgagtgggtggaggctaacccactatgggagatgaaggctttctcatatcaaggagaagttacacaagagcctattgccaagatgagggcgatgaccatcactgggctaacgctattcctcgatgtgacgcttgagacatggcgacaatacagggtgagagaagacttatctgaggtcgttacgcgagcagagcaaatcatctacgaccagaaattctccggcgcagccgctgatcttctcaacgctaacatcatcgcccgcgatttgggcctcaaagagcagtcgcaatttgaagacgtgacacctgataagggagatcgcgataagcgccgctctcgtatcaaggagctattcaaccgtggaactggacgcgattcttgataacctgagcgacgaagagcaaatcgaattgctcgagctactcgaagaagaagagaactaccgaaatacacacttgctatatgagtttacgccatacagcaaacagcgtgagttcatcgacgcaggtcatgattatccagagcgatgttttatggctggtaaccagcttggtaagtcatttactggcgctgctgaagtcgcgtttcaccttaccgggcgatacccgggaacgaaaggttatccggctgatggtaaatatggcggagagtggaaaggtaagcgtttctatgagccagttgtcttctgggttggcggtgaaacaaacgagactgtaaccaaaacgactcaacgcatcctgtgcgggcgtatcgaagagaatgatgaacctggctatgggtcaatcccgaaagaggacatcattagctggaagaagtctccgttcttccctaatcttgttgatcaccttcttgttaagcaccacacgccagaaggcgtcgaagatggcatctcaatatgctactttaagccttactcacagggccgcgcccgctggcagggcgacacaattcacggcgtctggtttgacgaagagccgccatatagcatctatggcgaaggtcttacccgtacaaacaaatacgggcaattctcaattctgacgtttaccccgctgatggggatgtctgacgttgttaccaagttcctgaagaatcccagtaagtcgcagaaagtggtcaacatgaccatctatgatgctgagcactacaccgacgagcagaaagagcaaatcatagcatcctatcctgagcatgagagagaggcacgtgctcgtggtattcctacgatgggtagcggtcgaatattccagataccggaagagacgattaagtgccagccgtttgagtgtcccgatcacttctatgttatcgacgctcaggacttcggctggaaccacccgcaagctcacattcagctttggtgggacaaagacgcagatgttttctatctggcgcgtgtatggaagaaatcagagaacactgccgttcaggcatggggtgctgttaagtcgtgggctaacaaaatacctgtcgcgtggcctcatgacggtcaccaacacgaaaagggcggtggtgagcaacttaaaacccaatatgcggatgccgggttctctatgcttcccgatcacgcaacgttcccggatggcggtaactcagtagagtcaggcattagtgaacttcgtgacctgatgcttgaaggaagattcaaagcattcaatacatgcgaaccattttttgaagagttccgcctatatcatcgcgatgagaacggcaagattgtcaagaccaacgatgatgtgctcgatgctactcgctacggctacatgatgcgccgcttcgccaggatgatgcgcgatatcagaaagccgaaagaaaagaaaatccccgcaccgattagaccagtacgcagaggacgataatggccgacaatgaaaacaggctggagagtatcctgtcgcgctttgatgcggactggacagccagcgatgaagccagaagggaggccaagaatgatctcttcttctcccgcgtatctcagtgggatgactggctatcacaatacacaaccctgcagtatcgcgggcagttcgatgttgtacgtccagtggtgcgcaagctcgtttctgagatgcgtcagaaccctattgatgttctgtatcgtccaaaggatggagcaagtcctgacgccgctgatgtgctgatgggcatgtatcgcaccgacatgcggcacaatacggcgaaaattgctgtcaacatagccgttcgtgagcagattgaagcaggcgtgggtgcgtggcgtctggtcactgattacgaagaccaaagcccgacgagtaacaatcaggttattcgtcgagagcctatccatagtgcctgctcccatgttatctgggacagcaacagcaaactgatggacaagtctgacgcccgtcactgcacagttatccactcaatgagccagaatggctgggatgatttcgcagaaaaatacgacctcgatgctgataatattccatcattccagaaccccaacgattgggtatttccatggctgacgcaggacacaattcagatcgctgagttttacgaagtggtcgagaagaaagagacggcgtttatctaccaagacccggttacgggtgagccggtaagctactttaagcgcgatattaaagacgtcatcgacgacctggctgatagtggatttatcaaaattgcagagcgccagattaagcgtcgccgggtatacaaatctattatcacctgcaccgcagtactgaaagataagcaactcattgctggagaacatatccccattgttccggtattcggagagtggggcttcgttgaagataaagaagtgtatgagggggtcgtccgcctgacaaaagacggtcagcgtctgcgcaacatgattatgtcgttcaacgccgacatcgtggcccgcaccccaaagaagaagcctttcttctggcctgagcagattgcaggctttgagcatatgtatgacggtaacgacgattacccatactacctgctcaatcgcacggatgagaacaacggagaaatgccaactcagccgctggcatattacgaaaacccggaggtcccgcaagccaacgcctacatgctggaagcagccaccgcggcagtgaaagaggtcgcgacgctaggtgttgatgcagaggcggtaaacggtggacaggtagcctacgacactgttaaccagctaaacatgcgcgctgaccttgagacatacgtgtttcaggataatctggctaccgctatgcgccgtgacggtgagatttaccagtcgatagttaatgacatctacgatgttcctcgcaacgtgacaatcacccttgaggatggtagtgagaaagaggttcagctaatggctgaggttgttgaccttgccactggtgaacggcaggtactgaacgatatcagggggcgctatgagtgctacacggatgttggaccatcattccagtccatgaagcagcaaaaccgctcagaaattcttgagttgctcggcaagacgccgcagggaacgccagaatatcaactgctgttgcttcagtacttcacactgcttgatggcaaaggcgttgagatgatgcgcgattatgccaataagcagcttattcagatgggcgttaagaagccagaaacgcctgaagagcagcaatggttagtagaggcgcaacaagccaaacaaggtcaacaagacccggcaatggttcaggctcagggcgtactcctgcaggggcaggctgaactggctaaagctcagaaccagacgctgtccctgcaaatcgatgcagctaaagtcgaagcgcagaaccagcttaacgctgccagaatcgcagaaatcttcaacaacatggacctcagtaaacaatctgagtttagagagttccttaaaaccgttgcttcattccagcaggaccgcagcgaagacgctcgcgcaaatgctgagttactccttaaaggcaatgaacagacgcacaagcagcgaatggacattgccaacatcctgcaatcgcagagacaaaatcaaccttccggcagtgtagccgagacacctcaataagagagagttaatcatggaaccaaccaccgaaattcaggcaactgaagacttaaccctgtccggcgatcatgcagcggcatctgctgatagcttagttgtcgataatgccaacgacaatgcaggtcaggaagagggctttgagattgtcctgaagtacgatgagacagcaccaaaacaagacccggcaaagaacgcagaattcgcccgccgccgcatcgagcgcaaacgacagcgcgagcttgagcagcagatggaagcagttaaatgcggagaattgccggagagtttacgggtaaaccctgaccttccacctcagccggatattaatgcctatctgtcagaagaaggcctggccaaatatgactatgacaacagccgtgcgcttgccgctttcaatgctgctaataccgaatggctaatgaaagcgcaggacgcccgcagcaatgccgtagcagaacagggccgcaagactcaggagtttacccagaaatcagcgcaatacgtcgaagctgcccgcaaacactatgacgcggcggaaaagctcaatatccctgactatcaggagaaagaagacgcatttatgcaactggttccgcctgcggttggggccgacattatgcgcctgttcccggagaagtccgccgcgctcatgtatcacctgggtgcaaacccggagaaagcccgccagttactggcgatggatgggcagtccgcgctgattgaactcactcgactatccgaacgcttaactctcaagcctcgcggtaaacaaatctcttccgctccccctgctgaccagccgattaccggtgatgtcagcgcagcaaataaagatgccattcgtaaacagatggatgcagctgcgagcaagggagatgtggaaacctaccgcaagctaaaggcaaaacttaaaggaatccgataatggctttgaacgaaggtcaaattgttacactggcggtggatgagattattgaaaccatctccgcaatcactccaatggcgcagaaagccaagaaatacaccccgcctgctgcttccatgcagcgctccagcaataccatctggatgcctgtagagcaggagtcccccactcaggagggttgggatttaactgataaagcgacagggttactggagcttaacgtcgcggtaaacatgggagagccagataacgacttcttccagttacgcgccgatgatttgcgtgatgagacagcgtatcgtcaccgaatccagtccgcagcccgcaaactggctaacaacgttgagctgaaagtcgcaaacatggccgccgagatggggtcattggttatcacttcgccggacgctatcggcactaacaccgcagacgcatggaactttgtggccgatgcagaagaactgatgttctcccgcgaacttaaccgcgacatggggacatcgtacttcttcaacccacaggactacaaaaaggcgggttatgacctgactaagcgcgatatcttcgggcgcattcctgaagaagcgtaccgcgatggcactatccagcgtcaggttgctggcttcgatgatgtcctgcgctctccgaaacttcctgtgctgaccaaatctactgcaactggcatcactgtatccggtgcgcagtccttcaagcctgtcgcatggcaactggataacgatggcaacaaagttaacgttgataaccgttttgctaccgtcaccctgtctgcaactaccggcctgaaacgcggcgacaaaatttcgtttactggcgtgaagttccttggtcagatggctaagaacgtactggcgcaggacgcgactttctccgtagttcgcgttgttgatggtactcacgttgaaatcacgccgaagcctgtagcactggatgatgtttctctttctcctgagcaacgcgcctacgctaacgttaacacctcactggctgatgcaatggcggtgaacatcctgaacgttaaggatgcccgtaccaacgtgttctgggctgatgacgccatccgtattgtgtctcagccgattcctgctaaccacgaattgtttgcaggtatgaaaactacctcattcagcatcccggatgtcggccttaacggtatcttcgctacgcagggtgatatttccaccctgtccggcctgtgccgtattgcgctgtggtacggcgtaaacgcgacacgaccggaagcaatcggtgttggcctgcctggtcagactgcgtaactaacaggggcttcggcccctttcttatttgaggtgacacatgggtgtaatgctatataagcagggtcgtggaacgaaggtatggggcaaggacgttcaggttaaagttgtcgatgacggcgacgtagaagatcaccttgccgatggttgggttaggcatccaaatgaggttccggagactaatgacgagccaatcggtgattcaggcgtggtcaagaaagacatgggtgaagtatctgatggataccacacctttaacgaactatatgcacatcgagtgcgcctgttttcaacactaatgaatgccttccgcgaaagcgcatggtggagctttcagcatcatgacggcgagcaatgggatggatgggtgttagctggcatcgacaccccagaaggcgcggtaacataccacctcccagagagtgaaattgaacatctgcctaaaggcacggaaattgagtttggcaaggaatgggacggccacacggcagatgatgtgttgaatcgtctgctaagcctgcgaccgaaagaaccggcaaccaaagaacgcaaaaagccaggaccaaagcctaaggcggaaagcgatgcagataaagactaaaggcgatctggtcagggcggcgctgcgtaagcttggtgtagcatcagatgcaactctcactgatgttgagccacagtctatgcaggatgccgtagatgaccttgaagcgatgatggctgagtggtatcaggacgggaaaggcattgttaccgggtatgtattctcagatgatgataacccgccatccgaaggtgacgaccacggtcttcgctcaagcgcaatcagcgcagtattccacaatctggcttgcagaattgctccggattatgcgcttgaggctaccgccaaaattatcgcaaccgctaaatatgggaaggagcttctctataagcagaccgccatcgccagagccaaaagagctccttacccgtcacgcatgccaacaggcagcggtaatagtttcgccaatctgaacgaatggcattatttccccggagagcagaatgccgattcaacaactccccatgatgaagggaatgggtaaagacttcaagaatgccgactacattgattacctaccaatcaatatgttggccacaccgaaagaagtactcaactcatcgggttatttacgctcattcccgggcatagcgaagcgcaacgatgtaaatggagtatcgcgcggagttgagtataacaccgctcagaacgctgtatatcgtgtttgtggcggcaagctctacaaaggtgaagccgtagtcggtgatgttgccggaagcggtcgcgtatcaatggcacatggtcgcacatcacaggcggtaggcgttaatggtcagctcatcgagtatcgctatgatggcgcggttaaaaccgtctcaaactggcctgcagacagcggattcacgcagtatgagttaggctcagtccgtgacattactcgcttacgtgggcgttatgcatggtcaaaagacggtacagattcatggtttatcactgaccttgaagatgaatcgcatcctgaccgctacagtgcagaatatcgcgcagaatcgcagcctgacgggataattggcataggttcatggcgagatttcatcgtctgctttggctcgtcgacgatagagtatttctccctgacaggcgcaaccaccgttggcgctgcgttgtatgtcgcgcagccatcgttaatggtacagaaggggattgccggaacatactgtaaaacgccattcgctgattcatatgcattcatcagtcacccggctactggcgcaccttccgtctacatcatcgggtcagggcaggcttcaccaattgcgacggccagtattgagaagattatccgctcatacacagctgaagaactggcgactggtgtaatggagactttgcgcttcgattctcatgagcttctgattattcatctccctcgtcatgttctggtttacgacgcatcgtcaagtcagaacggaccgcaatggtgtgtgctgaaaacagggctttacgatgatgtatatcgtgctgtcgacttcatgtatgaaggcaaccagataacgtgcggcgataaatcagaagcgttgacaggacaattgcaattcgacatcagcagccaatacggactacagcaagaacacctgttgtttacccccctcttcaaagcggacaatgccagatgcttcgacctcgaagttgaatcatccactggtgttgctcaatatgctgaccgcctgtttctgtctgcaaccacggacggaatcaattacggtcgcgaacagatgattgaacaaaatgagccgtttgtgtacgacaagcgtgttatctggaaacgtgttgggcgcattcgtcgattaatcggattcaaactgcgggtaatcaccaaatcaccagtaacactatccgggtgtcaaattcgtctggagtaacatatggcagacccgtcacttaataagcctgtcattattcaggccactcgtcttgatgcctcaatcctcccccgcaacgtcttcagccagtcttatctgctctacgtaatcgcgcagggggctgacgttggcgctattgcgggaaaggcaaacgaagcagggcaaggtgcctatgacgcgcaggtaaagaacgatgagcaggatgttgagcttgcagaccacgaagcgaaaattcagcagttacgcatcgacgtagacgaccatgaaatccgtattactgcaaataccaatgcaattgcggcgctggatgtcagactaaccacggctgaaggagaaatagtcaccttgcaggctgatgtcagtgctcttgatggtagagtgacgacggctgaaggaaatatttctgcattgcaggttgattacgtatcgaaaacagctaccgcaacacaatcgctggcgtcacctctcaacgtgacaacgtcctattcagttggcggtactaaagttatcggtgctcgacagaccggatggacagcagcaacaggcgctgcgcttctcggtgcattcaacgctaaccaggcatacacggtcagtgccacatatacgcagtctgaggtatcagctctggctaccggattgcagcaggcgcgacagcgtatcaaagctctcgaagatgcaatacgaactcatggattaatcaactgatgattacattcattccaacacgcaacatcgacctgatagaaacggtcggcaatcatcccgacatcatcgccgggagtaacaacggtgacggatacgactacaaacctgagtgccgctatttcgaagtgaacgtacatggtcagttcggtggcatcgtgtattacaacgagattcagccgctgacctttgactgccacgccatgtacctgcctgagattcgcggattcagtaaggaaatcgggctgacgttctggcgatatattcttaccaataccaccgttcagtgcgttacatcatttgctgcacgcaaatttcgccacggtcagatgtactgcgcaatgattggtcttaagcgtgtaggaaccatcaagaaatacttcaaaggcgtggatgacgtgacgttttacagcgccacacgcgaagaactaatcgacttcctgaatcacgggagataaacatgttatatgcatttacgctgggcagaaaactgcgcggtgaggaaccttattatcctgaaaaaggcggaaaaggtggcgcagataaaagcgcaaagtatgcagcagaagcgcaaaagtatgccgcagacctgcaaaaccagcagttcaacaccatcatgaacaacctgaagccgtttactcctctggcagataagtatatcggcagtcttgaaggtttatcgtctctcgaaggtcaggggcaggcgcttaataattactataactcccaacaataccaggactttgtggggcaggctcgctatcagaatctggcagcggcagaagcaacaggtggccttggttctacagcgaccagtaaccagcttgcagcaatcgccccaacacttggtcagcaatggctgtcaggtcagatgaataactatcagaaccttgcaaatattggtcttggtgcgcttcaggggcaggcaaacgccggacagacatatgccaacaatatgagccagatttcacagcaaagcgcggctcttgcagcggcaaatgccaacagaccatcagcaatgcaatctgctattggcggaggtgcgtctggtgctattgctggggctggacttgcgaaattaattggttcatcaactccgtggggggctgcgatcggcggcggtcttggtctgcttggctcgttgttttaaggggtaatcaatggctacgtggcaacagggtattaattctggtggttttctggctggcattggtgcgcaaaatgagaacgcgccaaaggcaagcgacattaacgcaacgcttggactgattcgcgaaaacaatgagttggcccgttcaggcgctaataatgtggctttaacagggctgcgtggtctggctggagttgctgatatttataaccaggaacagcaacagaaagcgctaaacgcattcaatcaggttcatgccaacgcatgggctactggcgacaattcaggactcatcaagttcgcgcaggaaaacccggcgtttgttgcacaggcacaacaggcgttttccggtcttaatgagcagcagcgtaacgatatgggcgatttagccatgaaggctaacgtcgctctttctcaggggccggaagcctacagtaaattcattactgataacaaggacaggttaaaccgtgttggcgctaatccagactggatgatccagactggagtacagaatccagaacagctatcacacatgttgactacgatgtctctcggtgcgcttgggacagaaaaggcgtttgctgttcaggataagatggttggtcgccaacttgaaggagaaagaaaccagttaaccgcaagagggcaggatattagtgccgctaccgctcgaagggggcaggatattagtacccaaaactcgctacgttctgcgggcggggcggttccggcatcagtccgtgaatatcagtatttcaatagtttgtcgccagaacaacaaaaaaattatcttcgtgttcgtggcaggccggatgcaggtggggaaaatgttgtgcaattagcagacgggcgtactgttaatgtcaatggcaagctgcatggatctggcgctagtgcattttacgaaggtactgacgataacggaaatatggttcgtgtcccggcaagtgctattgcagcacctccaacgtctgcggcaagcgcacagaactacgcgatgaagaaagatatcgatgcaatcgcaaacgcagatgcttctgctctcgatttcatgactggaatgactggcggagcaggaaatccggcaattggtgcagatgttcgcagccgactcacaggcaaagaacaacgacagttatataactccgcacaacgtattcagggaagaatgcagaatcagggcgtggcagcagcaagagatatgggtgctagcggtatcaacaccattgcagaagcaaagatgtattttcagggtatgccgcaggttgactactcaagcccggaggctatgcagcagtcgattcgtgagattcaggaatacaccaacaattataacaagcagtacaacgttaatgttggtaaatcgcagtatcagcaatctcaacctgtacaggaatcacagcctgcatccaacagcaacttttcttcactatggggtgattaatggctaaggcatggaaagacgttattgcctctcaaaagtaccaggcattagcaccagagcagaaagcacaggcgcaggagcaatacttcaatgaagtagtagcaccgcaagccggaaacgatgccgaacaggctaaacaggctttctatgctgcttatccacctccaacggctcaacaaccagcaaaacaaccacatggaccggcgcagccacagcaacaaggtggcttcatgtctgaccttagcaatgctgctgcggagacggggcgtggattgcttcaggctggcgttaatctggcaaatatcccggcatcaatggctgatgcagtcgccagcgccggggcatgggctggtcagaagcttggcattggtgacggaacttatcagccatcgcctcgcgtcacgacacaaggacttgagcaggactttggcttgcaacaaggtgcgcttactccacagacgacagaaggcaaaatcttctctgaagcactgccatatttgactcctgttggggccgagagaattgcagcgcaggcatcatctattgccggtcgagttgctcagggtgcatcacgcttgttggcggagaacgctgttggttcattggctgcaaacagtgagcgtgataatccaggagcactggcaacagacttaggaactggtgttgcattaggcggggcaataaatcagttaggccgtgccgctggtgctgcttatcgtgggattcgcgggacgatcgcaccagaagcgcagcaggctattcagttcgctaatgctgctgatgttcctttgcatacaactgacgttttgcagccaaattcccgcgtcgggcgcatggcacagaccaccgctgaaaacatcccatttgctggaacaagcactatgcgagctaatcagcaagaagcgcgcagccagttggtagatgaatttgcatcacggtttggtgagtatgatccgtcaattgttattggcagcctgaaggcaaaaacatcaggaattcggaaagcagcagggaaccgtcttgagcaagttcagagcgcaatgacaggagtcaacattcagccaacgcgagcaattcagcagatagatgatgagattggaaaactgcaaaaattaggacaagttgccgacacggatacaattagcaaacttcaggcatacaggaatgaattggctaaaggtgatgttaacctggaacagttaagcagactgagaacgcagtttaggatggatgtcagaggagaaaggacacaaatgccaccgccagctgaggcggcagtgcagcgtgtatacagggcaatgacaggagacattgataactccattggccagaaccttggaaacgacactctgcgcagatacaagcaggccaatgcggtatacgcagatgaggctagtaagctccagaatacccgcttgaagaacgttctgatgaaaggggatctaactcctgaagttgtcaacaacatgttgttcagcaagaataaatcagaagttcagaatctgtaccggtcagtcggtcaggtgggacgcgctcagatgcgtaacggcatcatcggaaaggctatggagaaatcaggcggttctccggatcagttcctgcgccaggttaatttaatgtctacccagacgggaatcgcttttaaaggacgagatgctgcgtatctgaaaggactgaagaactatcttgagtcaaccaagcgtgctggtcaggcaggagtaacaacgcctacaggtcagcaaactataccgttcatcctaggtattggaacggtaactacccctgcgctggtaggtgttggtggcgggtatggtttgctggcaagaatgtatgagagtgaaccagcacgtaatgcaatgcttcgcctggctaatactccacgtggttctaccgcattcgagaaagcgttagccgaagttgagcgggctgttaactctgttgctcaaggtgctaaatcagatgcattaagcgaatagcagtctaccaactacgatgccgaagataaggaatgcaaagttcaataagtctctgttcataaatcctcgtaggaaccaatagagatcattctttgatctatatattatctgaatcccttacttaattgggtgatgataatgaaaaaaggtgtgatggttggctgtttttgtgtatttctcgctgggtgcgctacagcaacaaaaacgtatgctccagatggaagagaggcatataccatagaatgctctggagtaggtggttcatgggctatgtgtcaggccaaggccggagatctttgtggttcaaaaggctatgacctgattagcactggtagtgatcagggagctattgcaaacattgacggaagtactggcaacgcatttgcaacaaacaccatatcaagaagcatgtatatagcttgcaaaaaatgagtaaagcccggttcgccgggctatttttttcgatagaaatctttcaacttttcgaatactaattcttgaatttctctggatacgatgtctgcttcgcgttcagcatcatccctgtatccgattacaggcgtaggcttttcaagtgaatcagccactatctgcactagctctgcatttagtgaccttccgtttgcctttgccctctgcttaaccttttctttcagctcgtagggtagcctgaggttaaattgcgggtcatctcttcccatttctgatgcctcacttttgtaagtggatcagcatcatatgatctactggttgtatccacaataagaccaccgtggtcttaatgacgcattgccgtagccacgctgcgacgattactttcatctggagcacattaaatgacagatatcactgcaaacgtagttgtttctaaccctcgtcccgtcttcactgaatcccgttcgtttaaagctgttgcgaatgggaaaatttacattggtcagattgataccgatcctgttaatcctgccaatcagatacccgtatacattgaaaatgaggatggctctcacgtccagattgctcagccgctaattatcaacgcagccggtaaaatcgtatacaacggccaactggtgaaaattgtcaccgttcagggtcatagcatggctatctatgatgccaatggttctcaggttgactatattgctaacgtattgaagtacgatccagatcaatattcaatagaagctgataaaaaatttaagtattcagtaaaattatcagattatccaacattgcaggatgcagcatctgctgcggttgatggccttcttatcgatgttgattatcatttttataatggagagaaagttgattttggtggtaaggttctgactatagaatgtaaagctaagtttataggagatggaaatcttatttttacgaaattaggcaaaggttcccgcattgccggggtttttatggaaagcactacaacaccatgggttatcaagccttggacggatgacaatcagtggctaacggatgccgcagcggtcgttgccactttaaaacaatcgaaaaccgatgggtatcagccaaccgtaagcgattacgttaaattcccaggaatagaaacgttactcccacctaatgcaaaagggcaaaacataacgtctacgttagaaattagagaatgtataggggtcgaagttcatcgggctagcggtctaatggctggttttttgtttagagggtgtcacttctgcaagatggtagacgccaataatccaagcggaggtaaagatggcattataaccttcgaaaaccttagcggcgattggggtaagggtaactatgtcattggcggacgaaccagctatggatcagtaagtagcgcccaatttttacgtaataatggtggctttgaacgtgatggtggagttattgggtttacttcatatcgcgctggggagagtggtgttaaaacttggcaaggtactgtgggctcgacaacctctcgcaactataatctgcaattccgcgactcggtcgttatttaccccgtatgggacggattcgatttaggtgctgacactgacatgaatccggagttggacaggcctggggactaccctataacccaatacccactgcatcagttacccctaaatcacctgattgataatcttctggttcgcggggcgttaggtgtaggttttggtatggatggtaagggcatgtatgtgtctaatattaccgtagaagattgcgctggctctggcgcgtacctactcacccatgaatcagtatttaccaatatagccataattgataccaatactaaggatttccaggctaatcagatttatatatctggggcttgccgtgtgaacggtttacgtttaattgggatccgctcaaccgatgggcagggtctaaccatagacgcccctaactctaccgtaagcggtatcaccgggatggtagacccctctagaattaatgttgctaatttggcagaagaagggttaggtaatatccgcgctaatagtttcggctatgatagcgcagcgattaaactgcggattcataagttatcaaagaccttagatagcggagcattgtactcccacattaacggggggcccggttctggctcagcgtggactcaacttactgctatttcaggtaacacacctgacgctgtatcattaaaagttaaccacaaagattgcaggggggcagagataccatttgtccctgacatcgcgtcagatgattttataaaggattcctcatgttttttgccatattgggaaaataattctacttctttaaaggctttagtgaaaaaacccaatggagaattagttagattaaccttagcaacactttagatatgtaataaaaatgggtgtaaacacccatttttattttatggtaaatgttctatagctaattaaacctaacaactatggtttcccctacaacaccaatatcgtatacgttattaccagattttttccacccattttcaagtttcacctctttgtcatatagtctgtaatttctggagaacacatttctttgcattaacacctctgaccacatccaattattgttaataatgcgtggtattaactctctcattaaaggatgctttattactatgttttcatttattgatgcatacggttctgtgccaatgaattttatatttttcttgtctcttccaaatccaagatgatctatgtcttgagatattctatttacaatgctttcctcaagctgaaactgtgcatttatggcattgtaagcaccataagaaaatattgttgatattaaaagaataaaagaaaaatatattcttgatattaactgcttatcttcaaaagcatagaatacgcataggcaacaaaaaaacataaagccacccataccaatcaataccctcggtgcgtatattggtgattttagaaaaatcattggtccaatgatgaaaaacattgatgccaataaaattaaaactactagcaagaactttgttttcttattttcatctcttttgattacttttaaaactatgactatcaaagaaatgattagcgcaaagaatagcgagtagtagattaagtaattatcgccattcaagatcgtgctaaacattctataaaatgataagacgttagaaattatcccttcaaataaacttgagtttatctctataatcttactatgttcgatattgtaagaacctgttacaagtctttttgcaataaagtaagaataggcaaaatatcctactattaaaccagcgacagaagatgctgtattttttgtgatatttgaaattgagtttttcttaaccacatctgaaattataaaggccaacaagaatattgcgtaagtattcagcgcagcctgataaagactaaggaatgcaatggttaaaatggatgatattatgatatttataggcttgtattgataagcgacatacgatgagataatagatattgccacactcatgcacattgttaatgaatcatatctatatgatagattttcaataaagaatgggtttgccaaaatcatcataaaacaaagagatgctgtgatgtagtcatctccaaacagcttttccctgatgcaggatagtgccaatgctaaaataactatccctagcattaaaggtagcggagaagcatctataattggggttccaaaattaatgatatagaaaataaagtcggaaagtgggcgaccattgcctgaccaacccaacccgccatataaagacctacccaagtcatcaacgaaaaatgattgatgtgtcaataaaggaaatgtatatataatcgccaatccaagaaagattgatataaatatcctgtcattactattaaatttcacttttaaaacccttacgctttaatatgtatttaggccgctgtttggtttctatgtaaattctaccaatatattctccaagaatacctattcctatcaattgaacgccacccaggaaaagaacagaaacaagaagagacgggtagccaggaacattatttccaaatattaatttatcaataatcatccatgcaccgtaaaggaatgacatacctgcaataaacaatccaatgtaagtccatatgcggagcggaaatgttgagaaagaagttattccctccagcgccaggttccataatttccagccgttgaatttcgaatcaccggccacgcgttcggcacgggcatatttaacaacatccgtttttccgccaacccaactgagcacacccttcataaacaagttgcgttctggcatttgtttgatgttctcgacaaccgcacggctcattaaccgaaagtcgccaacattttcttcgatttttggattgctgattttattgtgcagcttataaaaccactcagctgtcttacgcttcaacctcccatcagttgagcggtctgagcgcttagccagcaccatatccgcgccagcctgccacttctcaatgagatgagggataacttctatcggatcctgtaaatcgacatcaataggaatgaccgcatctccggttgcatggtcgagacccgcgaaaagagcaggttctttaccgaagtttcgcgtaaacgaaagcggaataacgagcggatcagatgcggctattttgttaattattgattcagtcgcatctttactaccatcattaataaaaacgatctcaatttcatattcttttagctcattaaactcacgtaccgttttatagaaaatcggtatcgtgtcttcttcgttaaaaactggaacgacaagagagattttcatcttatatccctgaaaacaatgaatctggaatagataaagccgcataccaggctaattgccgagaaagtgataagggtaatcaatggtggcaaggaacattggtcagccatccagccaacaacagcgctcagtgttcccatgaatcccacatacatcatgtagcgaagcgtggtggtggtggcattaaaggtgaaacgcgcattggcatagaagctgaacgatacggcgataacaaaaccggaaaagttcgccagcgcctgatgcgtatgcatcccatacacacaaaaagcaaatacgccccaatgaataagcgtgttaagaacaccgatcgatgtgtacttagcgaataacttcaacattatgaaaatcagcggattcggaaaggtctggagtgtagcactacaaattactttgatcgatataaacgatcaataatgtaaactttgatagtttaaagttattgtttgctcgttaattgatcgttgttaccgatcaatttttattgctgattgctaagtggtttgggacaaaaacgggacacacaaagctttgcatcggcttgcaaggctttgcatgtttttcgaagatgggacgtgtgagcgcaggtatgacgcggtatgttgttgacttaaaaggtagttcttataattcgtaatgcgaaggtcgtaggttcgactcctattatcggcaccagttaaatcaaatacttacgtattattcgtgccttccttatttttactgtgggacatatttgggacagaagtaccaaaaatcgagtcaatttgtcgagcatgttcagtcaggtgatttggtgccagatgagcatatctgcgaaccatttcgatagactcccagccacccatttcctgcaataccgaaatcggaacgccagcctgaactaaccagcttgcccacgtgtgcctcaggtcatgaaaacggaagtcttcaatgcctgctcgttttaatgctgacctccatgcagtattagcgtcatagcgcatcttcctcactacaggtgatttagttccgtctggcttggtgctgctttccttgtagacgaacacccatttgtgatgattgcctatttgctttttcagcacccggcaagcagtatcattcagcgccacgccaatggcctgattggacttactttgttccgggtgtatccatgccacctttcgctgcatgtctatctgctgccaatccatattgataatgttagaccgccttaagccagtagaaagcgcaaactctacgactgactttagcggttccgggcattcatcaatcaacctttttgcctcgtgaggctcaagccagcggatacgcttatttttcggctgaggaactttgatgatcggagccttatccagcatcttccattcgcgttcagcagcccggaggagtgccttaatgaatgaaaggtgagttgcttttgtggctactgctgccggcttaggcttgaatactggaggctgcttcccattcttcctgcaagcttcatccattaacttccagttttcctcatgccgccgattagtcatcttctggatggcggagtaaatcttcgtctcggtaatatccttcaactgcatccctgcaaaatgctggagccagaatcctatccgactcttgtcatcatccagcgacttcttatgcgccttctcctctaaccacctgacacaggcctcctcaaaagtcatgtcaggcgtctctcctaatttatttaccctccatgcttctgccttcagtttgtcatgaagctctgtggcctgccttttgtcctttgtcccaagagactgcttaaatcttttgccgttcggcaatgtgaaactggcgtaccaggtttcacctctgcggaatagtgacatttcagttcctctgttatgtcatcacccgcgctcacctggacagtatgcagcggagattgaagtgccgcaacgcaggcttgtcgtgtggtgaggtaaggggatttaggtttggaagggtctttgcgtgttgcctgaaggcggcctgtgcgaatccagtttgtagcggtaggtctggatatcttgagaaatgcacaggcctcatcgagtgtgaggctgtgtgattccatagttactttcctaatactgaagcgagaagagcaatctctacaagaagctcaataaatccaaaaattgctatacctgcgtaaaccgcgccatcaatatccccgcggcgacaaagataggtggcactgatcacaagaatcatcattcactccataaaacaaaactcgccgtagcgagctcagataaaagaaatccccgcgagtgcgaggattgttattcattgccgatattcatctttatcgcgaacacctttaccggtttatcgccgaagtgcggatgtgtgattgtcttgatttcatatccgtcatacgggacgtcaattctgcggctggaatcgtcgcgcttcggatatccctttgtgataatcaggcggtcatactcccggaacataattcgcttattccagtagtcattacacaggcgatactcttccgttttctctccgcgaatcatggcatcgaagtattcacctttgacggcaagttgcaggttagccacgaccttcctcctttggcttgtgaatttgtatcgtcatgccgctttgagtggtgactacaacgacagaaccaggctgaaggctgttaagattgaatgcttcgtaaaacgaatccaatgccagtgcttttttattctttcggttccaccaacgccatcccttgctacaggctacactgacaatccactgtccactcctgtaagccatataaaaccagatgagcaaaacctgaaggaaggctatccagtcaataatcgtatatttcgcgaaggggtccatcacttcacctcctgcggtggctccggtagcggcatccagtgtgacggctcacataccccctcaacaccgttcatgtaaaagaattgaaataaccctttacctttgtgaaaccctaccatctgctcttttgtgtctgaacaataaaccaaaacatcttcttcgtttggcattcgctcactacagcttatccaaccatccggagttgccggatagctgcccgatagctcgttcaacttgtaagtttggcttacgggttcggcttccagttccgctatgcgcttttttgctgcttcaagctcaaagcgcagcttacctaccgtaagcgcaatatcctcgttctcctggtcgcggcgtttgatgtattgctggtttctttcccgttcatccagcagtgccagcacagtagccggattggctgcagcgatgaattcagcattggcctgctgttccatttggaaatcttcatcgaaaccgctttcaggatgcgctccttcaattctgcaaatgggaagatatccaacaacttcacgatgaattagcgcatcaccagcatcaaatctctcctctccatattcgagcgaccacacaccacacgttgctttctctgccttttcacgcagtgcctgatagtcaatcttgctcactggttgcctcctttgctcgctgattccactctgctctaacctctgaataaaaaatcgcgcagtcatttccaggcgccgcatatttgctaccagattgagcgcgacacgtaccgcatcgaacgaaatagaatcgaccgccagagccatattcagggtgatctgcttcgctggcaacgtgcgccgcgccgccacagaatggacatggtagtaggttggtcatgaatgcactcccttgcgaagttggtctgcacaatgcagcagggcgtccgtcgcttctttcaccgtaacgatgtcgccatcgtccagcccgacaaccgtagcgtccttaacgaacgccgagcaaaggtcattaaacgcctgcgcacgcacttcatccaggaaagcgtcggtggctggggtatcagtgaaatcgtccacccacgtatctccaacgtcctcgcactcgcgacgacaatattcgttgaattcgacctctgattttttcagtgccgcattctccgaagccagcgccgaaaacttctcgtgtgccaacttaacagccgaatcagcctgcttaattgactcaatcgctctctggtggtcttcggccagcgcggaaatcttggcctccgcttcagcaaatttacgcaccagatattcagcgtttgtttcgttaacctttaaatctcgtgggatgcatttacctttcagaaatccatccatctcaattagtgtcatttgtttcatttcttcccactccgccacatcgcattcagatatttgttttgattcactgatggaaaactctttctcgccagcatttcttcgcgtggaatatcgttgatgggcttgaagcggtgtcgaataatcatttccgatggaaggattccttggtcgtaggacaaacctctcatgatgaatccctcagttattgctgatagcgccgtaacgcgaacggtaatttttaaggcgcgggtctatttcaatgaatttggtgtaagtggcttttcggaatggtcggattgctgtttcgtttattcggtctttttcctgtttttctgcgagttgtatatcgcgtcggtacttccgttctgcttttgtttccggtggcagagcaagaaacgcgtcgagattgtttttgatattttccagcacctccgacttggagctaccggagcagttgcgcgggtcatccgcaccatatagaggtgcaggcataatttactccagggtaggttatccgaataatgtggtacgtatagggttatttctttcgtaaacgtgatagcctgctttttaccgactcttcacttcgcccgagaatttttgctacatttctttgtgtatagcctgatgagataagcgtctgcattcttttgtcttcgtcgtcgctccatcttggcttaacgaatgccgtttttaatgacagtttttttgctatgtaataaaactgatttatgtttaggcccagatgttctgctgcacggcaagctaccatgcgaccgcaaactgactccatctcagctggagttatgtttaatcttctcattaagccacctgtttaagctcatttattctgatattcattacctgaacgcattttgtctgcgcatcatcgtgaccagccaataattgccagtcatgctgatatctctcaattagctttttcttgtcagtttctgttgctgcataatcgctgaagtctttcaggatttgttcgcagtcaaccgatggagatttctggttggtattttctggtgatggttgattgcatgatgctggcatggcccagtccggcagcgatggagggagccagtaaaatcctgttccatccttcagttttgccctgtgccatccttgtttcttatctctggatatctgcgcaaatccttcctcaagattatacagataccgtcctattccccactgaacggctgcgcgcttcattgctcctgaacgaccgcctttgacggcttctacctgcgtgttttcagcggcatcccatttagttacccattcggaatcaatcttgattgatattccgcattcaacgccgccattgtttggaatatcgcgatattcattgcgccatccggcctttccgcaaacatcgtccaggcgtttcatgattgccctgttcgtgacataagccagcaccatagcccataacttcccatcgcgtgttttcccgctttgctgtattcgccactcaatatcttcagcagcgaacggttcatctaacagatccagattcatgagtaataccccgcaaattcatcccagctaataatcggattctgccgttctgcggctaagttaatttgctgctccacttcttcctcaatttcaggaggaatgagggcaataaactcgttatcatcaaaatcatgcaacatgacgcgcctcccattcttcgtcctgccacttatcccaaccaagagctattcctgcagcccatgtatacgcatcagacattccctgttttgtatccggaaatactttctcatatagcttgttgaactccctgtttccttgctgaacaagaattgttccgttaacaggcgtaatggtcatggcgtggtactcctggctgattaagaatttcaccgagacgtttccatccggcccgtaattttctggtgatacgctctaaaagtgattcattaagttgggcgatacccatgacggcaccgcccgcgatagcaaatgtcatcgtgggactctccattttcatttattggcatagctaaaacgcctcgatatgaagcgctgtggatatgcgataaaacagccgcactcaggcggctgttgttgtttcttctttcaggctttcgatatattcacgcgggtcgtcgtaacactggcattcgctataccaatccacccagcgatccgtaagctccatttcttccaaatcctggtcagtaaggctctcatcccacatctcaaggccgttagcgttgcagtaatcaggtttgatgttgttgtcatactgaaatgcgtcataatcagccagtgcatccatcactcgcacaccctcttcaacacttgctacttctacaatgaatggcttcataggaacttgcgggatatgccagacacgtaatttcatatttcccccaggtaaaaagaatgccgcccatatagagcggcaaataacatcaagggatgatttttcgattaaccagaacgagtcgtcgtcctcgtttggttacgagcgatattgctcacaatgaccactattaaaatggtcattaggtgcttattcgctgacaaatttggtaagactttcgtgtagcgaaaccagaatttcatcatcaaacccatcaagtaatgcttgttcgataagttttataatttctgatgcctgctctttatttatttccatcactcctccccaagagccttgctgatggctgcgcgagctttattgattaccccgtaccactccggataagtcacattgcgtccttctgccatcgctttttcagccaattgaagagcctcgagcaaatcaggagatgctgctatcaagtgtgcattggcctcacattcagctacgcgattttcgtcatgggtcatgataaaaccaagctgcaacccagctctatcttgcctgcaaatgcgtacatcctttccgctccaaggacctggcgtacctttaaactttttcatattcacctctgtgtctcgctgccaaaaatacgcttactcagttacttcatctgcatattctttacttgttaaccaatccgggcgttcacctttaccaatatagaaatcgataatgtccagaagacgtggataaaatttaagagctttacgaccatccatctcagcaatttcctgcttactatattttctccattcctcaactgtgtggttctggcatcctgctcgtacatattcaccgttcgttatacttatgaagtatttctcacccagaattacgaaagtgagatcaggcaggtcggcatcgcgcaggtcggcaccgcacaggtcggcatcgcgcaggtcggcaccgcgcaggttggcaccgtacaggtcggcaccgtaca

SEQ ID NO: 4 - DNA, 41278 bp, unidentified
  source 1..41278: mol_type = unassigned DNA
  misc_feature 1..41278: note = the genomic sequence of a bacteriophage
aggttggcaccgtacaggtcggcaccgcacaggtcggcatcgcgcaggtcggcaccgcgcaggttggcaccgtacaggtcggcaccgtacaggttggctctagatccgctctcacgcattgaggtaatccacactttgtgttcttcaagaatcttcgataaatctgctgaattcatgttgttattccttaaattttggcaataaaaaaggccgcattgcgacctgattagatatttgaagtgagataaaagaaggccaactatgtagactttagtttttccagctctctggcaatcattgccgtggttctgattgcccatttatcgacaatctttccatcttctctcaccagagccatttcctcaggcttcaccatacattcagcatcaagcttgcagcctttgcatttcacaaaacgactacaccattgatttgtatcaatagtcgtagtcatatgggtagtcctggtattgttccatcacatcctgaggatgctcttcgaactcttcaaattcttcttccatatctcatctcaaatagtggattgcggtagtaaagattgtgcctgtcttttaaccacgtcaggctcggtggttctcgtgtacccctacagcgagaaatcggataaactctattcacccctacagagagcaaaagagaatcgccgatgaacaactcatggtggcaggagctaatgcgttttttcctgcaaggaatgacacttaaacagttgattcatatgatcatcatcctgattttactgattgtcgttatgccggtaagcgtgaaagaatgggtaaacctgcataatccagaaatccttcctcagtactggatgtattacatcctgctgttctgtgttagctatgtgctgaatggtgttgttaattctgtttatcatgtcgtgaatgaaagaattgaggcatcaactgctcagcagcgtaaggccagagaagaaaaagtcgttcgggatttgtttgattcgttaactcttggagaaagagcgtatttggcattcgctgtagccgctaataaccagctaaagacagaaaagggaagccctgaagcaatttcattgctcgaaaaagggcttcttattcggataccttctgctactggatatcctgataccgaccgttttgttatcccggaaagctatagaaatgagtgctacattaggtttgccggggagtcagacattcttatgaatgaacttattgcacaggacgagcaggccaaaaaaataacgacttaaccgacaaatgttttacctcgctgttatttgtttgctcttacgataccctgccgcgtaaagtgctacgtctggaagaagtacagatcctccttcaacttccttctgacgcgttccggcaagcgaaatggctttggtaacgcggtcaattcttttggctttaacctcatgagaagcatcaggagcatcgcagccaaaaattgaatcaatgatattgcagatggtgtcgcgctccattgcgagctttctgcgccgctcatgacggcgagttttagcattgcctgcaaacgttgacttcccgtaggtgataaccgtcatgatttaatcctcatgtgaaatagctttggtgttgcagatagccaggcgactaaccctgaccgcgtactcattgccgagcgcctccgccgaagaggttggcttctacctgcaacccaaacccatctcgtttggtatttgttcgcgctttgtcagcgcatcatcgaagttaaagagcgttgcctttccgtttggctaccagcgtcctgctgatggctaaacaatagcattgagtattatccatatcaatacgttttgctattaattagtggtttttggtattatgttgttgatagcaaaatgaatttatttttataaatcctctatgccatactgttctgaacaaaaaacgagcgaggaatcagtgtgaaaagtgaggaagagttctttgcggagcttcacccgcaggtggttgaggttctcggtacagcgctgatgcaggtactggtagagcagcgcgaaccttcgcgtgaagctttgatagaaatgattcaggtactgtggcaggaagaggatgtggacttggctgtagaactggctattgatgttctgacgctgccgaaagagtagggcaaagaaaacccggcgcggtggccgggcgtgatcgcttactcatcttcatctagcaactcaaattgagtcccgggcgatggaaaggctcttttgaatgctctgtcaaactcagctttatttcttgagcttgaaaggatgccaactacctgccaaaggtgcgccctaaacatcggaactccgatgctatcggttaggaactgaaacatcttatatcttctaccgccattcgcataaacgacagggtttttttcatctagcatctcaaggatggcgcctttacttgatgctaatggttcgtagatatacttcctcgtaaacttaccgaaaaactgagggtgccgacctgcttttttctgcgtaagtccgtaaagtcgataaaggccatccgtgaactgcttcggaaattccttctcatattctctgacctgctctttgatgaactcttgaaagagaattcgatattcatcttgtctcttttcatcgatatgcccagtagcttcgtctaccagcgctacaataccaacctctgcaagaccgcgcatgataatgtctgcctgaacagaaataggtatctgagatgactgaagggcatcaccctgatctctcatcttcaaataaacattgcatatctttgggagcaaagatgcttcaatgccgtaagctggcgccgctcctttatttattttgaaaagacggcgccgggataggccttctgataattcattattaatgaatggcttaatgtttttagctgacaagaaaacaggaagataggcgccatctggattctctttcattctcttccagtgggagcctccacgcttcccgccgaaggctttagtgatagctctctctgacagaaccctcgtcccatcctcaagcacggcacattgtatctttaagtctccaatgacaatgtcgccagatcttttggcaatttccacctcaccatcgccaccccacctagctgctgcggcttttcttgcaatagccgacctttcttctgcagaaagagcattagcccttgccacaccacctttggactttcccgttggttctttgctttctttatcagacattatgcaagcactctttgttgtgaaatgtgcttgcataatatcaagtatataaattaataagcaagcatatattctatcttgagtgcttgcatttttttgtaaaaaggccgcatttctgcgacctgtttcacacaatcactatcacccaaacatcccttcggtccatcatcacccgaatatctcatcaggccattggctggctaaccgtgcttcctataggtctgcggcatgcttccaattacctttccaaagacaaaaaccctattcatttcatctctttcaattgggtcccaagctgaataactcttattatcagatatgaccaatagtttatctttcatcttctggagccgcttaacatgtgcagtatcgtcatagaggaaggcgtatatcccatccccatcgaagtttttgatgcttacgtctacaaacaacagatctcctggttcaatagttcctgacatgctatctccgcgcacatttatgatgcggatattttcagcctttctaccatcgaacatgtgtctggcatcgtcctgcgaatactcaaccgagcggagtatttccacgaattctcgattgataacgccaggacccgcgctaacttcaagatctaggatatcgattttaaatgtgtttgaagatggagatgcgtttatcggagtagttccatcttttttcataggaccaattccggtagacaaccattccgaattaacacctaacgcgtttgctatttcaacaatctttgttgacccacgagcgtttccacttgtcaaacgccagatcgttggctgagcaacgcctgacgctttagcgagagcaccttgagacataccagccagttccattgccttgttgagacggtcagagagagtttcttttttcataatattcaatttatacgcttgcgtattaatggtcaaaacacgttttgctattgctttgattaatactcattgctattatttgttgtgtgttatacgaaagggaataagcaatgactaacaaagcaatacaaaaagctgttgccattgcaggaagccagcaaaaactcgcctctttgtgtggagttaagcagccaactgtatggcgttggttacatggtggcggcattgacgctaagtatgtggcagcaatcgtaaaagctacaggaggaagaattaaagccagagaacttcgtcctgatttagccgacttactggcagcaagttaagtatcaacgctctttaccaatctgaaccgccgacaacgcggtaaatctattaaacggatttgcgtgtatttgcgaatccaactctatctaatttctaaggaatattttgaatgaacgtagttgcaactaaaagcaagaaggcggctcgcatcgagtccaccttactcaacaagttagccatgatgggccagaagacattcgctaaagctatgggtgttcctgaataccaggtaagccgatggaagaacggtttcttctctcaggtcagcatgatgcttgcggttctggagtatggaatcgaagacgaggaaatggcagagctcaccaggcgacttgctacctacctgacaaaagaaaaagccccgaagaacggcgaattcttcgaggcctgatgtagaaagactggatcaatccacaggagtcattatgacaaaacgtcgtaagaaataccaggaaaaagaagagattcgacaccctgattcacctgagggattagtagtagccgcagcaaataacagggcgttcgcagagcgccttgttggtgtttacagactagccaaagcaggagtgaaacatgggcgtcgttaagttagctgattacaggcctcatctggaggtcgtggagcatcgcgtggcagataccgaagatggtttcatgcgcgttgctaacgagattaccgacagtctgctgatggctgatttaaccgtccggcagttgaaggtgatgctcgctatcatgcgcaagacatacggattcaataagccgatggatcgactcacaaacacgcagatagcagccatgacaggtattcatcacactcatgtttgcgctgctaagcgccagcttattgagcgtaaattcctcattgctgatggcgtgaaaatcggagtgaacaaggtggtttcgcagtggattagccaggacagcttaacattagctaaaacagctaataaaacattagccaagtcggctaatgggtataagccaagtcagctaaacacaaaagacaatatacaaaagacaataaatacaaatacccccttaccccctaacgggggcggcgatgggcaggttaaacctgaacgtcgcaaggcagaacgaatcgactacgaatccttcctgaacgcctacaacaccgaagtcggtgacagacttccacatgctgtttcggtcaacgagaaacggaaacgccgcctgaagaaaatcatcccgcaactgaaaacgccaaacgtggacggtttcagggcgtatgtcagggcgtttgtgcatcaggccaagccgttttacttcggagacaacgacacaggctggacggctgattttgattacctgctgagggaagattcgttaacgggagttcgggaagggaagtttgcagacagggggattgcatgagacaggatatcgaagcgagcgttatcggtggcttgctgattggtggattaacaccaaccgcgagtgacgttctggcaacgctggagcctgaagcattctcaattccgctttaccggaaagcttttgaagttattcgaaagcaggccagaaacaggaacctgattgatggactgatggtggccgaggagtgcggggatgaatacgcaacggcggtgatgatgactgcgcggtcatgtcccagcgctgcaaacctgaaaggttatgccggaatggttgtagacagttatcaacggcgtcaggttttacagctactggatgagatgcgagagccaatcagtaacggcacgctggatgcttcaggtagagcgatggacgatcttgttaagcgtctttcagccatcaggaagccacgcaacgaggttaaacctgtgcgactgggggaaattatcaatgattacactgacacgcttgacaggcgtctgaggaacggagaagagtcggataccctgaagaccggaatcgaagagcttgacgctatcaccggaggaatgaacgcagaagaccttgtgattattgctgctcgtccaggtatgggtaaaaccgaactggcgctgaagatagccgaaggcgtggcaagtcgtgttattcctggttctggcgtccggcgcggtgtgttgattttctcgatggaaatgagcgccattcaggttgttgagagagggattgccggcgcaggaatgatgtcggtcagtgtgctgcgtaacccgtcacgaatggacgatgaaggatgggcgagagttgcaagcgggatgaagttgctggcagatctggatgtgtgggtagttgacgcatcgcgtttgtctgtcgaagaaatcaggtccatttccgaacgccacaagcaggagcatcctaatctgtcactgattatggctgactatctcgggctaattgagaaaccaaaagcggaacgtaatgacctcgccatagcacatatctccggtagcctgaaagcgatggcgaaagacctgaaaactccagttatctccctaagccagctttcacgcgatgttgagaagcggccaaacaagcgcccgacaaacgcagatttgcgtgattcaggaagcattgaacaggatgcagactcaatcatcatgctttaccgtgaagcggtatacgacgagaacagtagcgccgcaccatttgctgaaatcattgtgacgaaaaaccgttttggctcgcttggtacggtttaccagcggttctgcaacggacactttgttgcatgtgaccaggatgaagccagacagatttgcacagcatcaaatgcacctgctgcgcgtggcagacgatatgcacaaggggctgacgtatgaataaaaaacaattagccattctcgaaaaggcatgggatgcacaaatatcatacgctttgaaagaacaggcactaccaataatccagaccaaatcgaaaatagccaggcagttatgcgatgacggattcctaaacgaagttgagattacgcaccagatggcaacgttcaaagggtatgagataaatcatcatggtatagcagcgtattgctcccatcttcctgatgacgttgacattgatgaaatggaaagggagatgaagcaatgaccatctacatcactgagctaataacaggcctgctggtaatcgcaggcctttttatttgggggagagggaagacatgaaaaaactaacctttgaaattcgatctccagcacatcagcaaaatgccattcacgcagtacagcaaatccttccagacccaaccaaaccaatcgtagtaaccattcaggaacgcaaccgcagcttagaccaaaatcggaagctttgggcttgcctttgtgatgtctcacgtcaggttaactggcatggacgatggcttgacgctgaaagctggaagtgtgtgtttaccgcggcattaaagcagcaggacgttgttcctaaccttgccgggaatggctttgtggtaataggccagtcaaccagcaggatgcgtgtaagcgaatttgcggagctattagagcttatacaggcattcggtacagagcgcggcgttaagtggtcagacgaagcccggttagcactggaatggaaagcgaggtttggagacgccgcatgaaacactgctaccgctgcggagaaagcaaagacgattatcgattccggccaaatcaaccttattggcaccaatggtgtatcagatgtgagcggtcgccagtaggtaatttcccgctgccagagacgaagggggacgtatggcacgacagcgacgaagtatcaccgacataatctgcgaaaactgcaaataccttccaacgaaacgctccagaaataaacgcaagccaatcccaaaagaatctgacgtaaaaacattcaactacacggctcacctgtgggatatccggtggcttagagaacgtgcgaggaaatgacaatggattattcacagttaagtgattttgaaattaaccgaatggtaggagacataatttttaaaggcctttgggcatgtaagccggaaacgtcagggaataacaccaacaaatggtattacggaaacgctgatacaacttttgagccattaaaccatttacctgattactgcaatgatccgagtgcctcatggccgattattgagaaacacaggatttctatcttagaccagttaactgaatggtgtgtggatgcaaaaggcgtaagcccaatatttgataccagacctctccgcgccgccatgattgtctttctcatgatgcaggacgccaataatgcttagtccatcccaatcccttcaataccagaaagaaagcgtcgagcgggctttaacgtgcgctaactgcggtcagaagctgcatgtgctggaagttcacgtatgtgagcactgctgcgcagaactgatgagcgatccgaatagctcaatgtacgaggaagaagacgatggctaaaccagcgcgaagacgatgcaaaaacgaagaatgtagggaatggtttcaccctgcattcgctaatcagtggtggtgctctccagagtgtggaaccaagatagcactcgagcgacgaagcaaagaacgcgaaaaagcggaaaaagcagcagagaagaaacgacgacgagaggaacagaaacagaaagataaactgaagattcgaaaactcgccttaaagccccgcagttactggattaaacaagcccaacaagccgtaaacgccctcatcagagaaagagaccgcgacttaccatgtgtctcgtgcggaacgctcacgtctgctcagtgggatgccgggcattaccggacaactgctgcggcacctcaactccgatttgatgaacgcaatattcacaagcaatgcgtggtgtgcaaccagcacaaaagcggaaatctcgttccgtatcgcgtcgaactgattaatcgcatcgggcaggaagcagtagacgaaatcgaatcaaaccataaccgccatcgctggactatcgaagaatgcaaagcgattaaggcggagtatcagcagaaacttaaagacctgcgtgacagcagaagagaggcagcatgagcaaaatccaatacccaatgaccactgcggcaattttcgatgatgttgtctatccgctgcatttcgacaatgccggcaaggtcaggcaagaaatggaaggcgctgttaactggttctgcaggtggcgcaacgaagagaaagccgttgtgaaagcgagattgttggtcagttgctggggtcaatatctgagccatgagcaggttatccgggaggccgcatgacacacactatcaaaaccattccagacatgctcattgagacatacggaaaccagacagaagtagccaggcgattgtcgtgccatcgaaacacagtcaggcgttatctgtacgacaaagaagccaggtatcacgccatcgttaacggcgttttaatgattcatcagggcgggagaggtatctatgaccgtaaccagcattaaccaggcgaaacagcagtgtgaacgtgacgaagctgaattgcgcagcgtcagagagatgacggagcaacaccagaaggcgatggattatctgcatgagcgagagcgtgaactggtgaaccggcttggattgaacaagacatcgggaggcgatgctgcatgaatttggaaaacactgtgaaattccactctccgaagtctcctcaactatcagattcaccgagagcaacggcatcagactcactgactaataccgatgtgatggcagcatttggtatggcgcaaagtcgcgctccgctcgggttcagtgctttcagcggcaagatgaacctgagcgacaacgataagcgtaaggcaattcagttactggtacagcatgggatgaagcattgcgacaaggtggctgccttacgcaaacttgataccaatgttaaagggaaagtagtgcaaacgctcgcaactttcgcgtatcaggattactgccggtcggcagctagtaatgtcatgtgttcgtgctgcaaggggcgcggagtattaaggaataagaagcggatcgttaaacatcctgggtgtggagagaaaactcctgcaaagacggctgtggaggtaacggaatcactatgcactaaatgcaatggtgcaggtgttgtatctacatcttgcgttaaatgccgtgggcgtggcgtagcgctggacaggaagaaatcagaactacagggcgctccagtttattcatcctgcaagcagtgctcagggcgtgggtatgagcgcatacctgcggcctcatgctttcgtgcgatatgtcagttcaccgctgcaatttcaccaggcgtatgggataaggctattaagccattctatgagtcattaattagcaaggttgaaatggaggagtctgctgcaaatgtagttttatcgaaagttaccagctaagttttattccgataacgattgtatcttgcaaaatgacgaaaagtagaatatcataaccctaacagtagaaatccgtgctttgttaaggtggatttaaaaaaaaggccctgcaatgatgcggggctttttgcgttttaagaacgacatttctgaaagcgccctatcaccaatcaccagaacatatccagatacccttgctcattcgtggcgactgggtagggcgttttacacaaaagaaaacccagcactatggctgggcttcgtgaggatgggggcaagaggttgcgctaacaacctcctgccgttttgcccgtgcatatcggtcacgaacaaatctgattactaaacacagtagcctggatttgttctatcagtaatcgaccttattcctaattaaatagagcaaatcccctcaatgaaggggtagagcatgtaccgtatggacaaaatcagagaatggttcagttacagcttcggaggactgactgcgatgggtggcattctctccctgaatgactgggctgtcatcattggtattctttgtactgtcggcacatttggcatcaactggtactacaaacgcaaagagcgtgaggacagattgaatggcaatgtcaccggcactacgaaatagcgtaatggcggcgataagtggcggggctattgctatagcatctgtgttaatcactggccccggtggtaacgatggtctggaaggtgtcagatacaaaccatataaggacgtagtcggtgtgttgactgtgtgttatggccacaccggaaaagacatcatgcctggtaaaacgtataccgaagcagaatgcaaagccctcctgaataaagaccttatcactgtcgccagacaaattaacccgtacatcaaagtagatataccggaaacaacgcgcggcgctctttactcgttcgtttacaatgtgggcgcaggcaatttcagaacatcgacgcttcttcgcaaaatcaatcagggtgatatcaaaggtgcatgtgatcagctacgtcgctggacatacgctggcggtaagcaatggaaaggcctgatgactcgtcgtgaggttgagcgtgatgtctgtttgtggggtaagcaatgagcagattaacctcgattatctccgctctggttatctgcatcatcgtctgcctgtcatgggctgttaatcattatcgtgataacgccatcacctacaaagtccagcgcgacactgttactcaaaagctggcgctggcgaacgcgacaattaccgatatgcaaacgcgccagcgtgatgtagcagaacttgacgccagatacacaaaggagcttgctgatgcgaaagctgagaatgatgctcttcggcgcaagcttgataatggtggtcgggtgctcgtcaaaggaaaatgccctgtgtcatcctcagccgaaacctccagcgcctccggcatgggcaatgatgccaccgtcgaactctctccagttgctggacgaaacgttctcggtatccgggacggaatcatcagcgaccaagcagcactgagaacgcttcaggagtacatcaggacgcaatgcctgaaataatttccatcacatagaaatttgacaagtgactttcatgaaaatgcctcgtaatgccgggcttttttgtatccgcagtaaatgcgcttcacacgcgcgacttctgaacacagaacctttcaggatgacccttgaggatgccggtttggtgatcggtacctttctgtgggccggaatcctgtgtgacaaggttcatcacttaaaggtgatcactgatgaagtacccaacagttatggtcaatggtgtgtccgttcgtgttgatgaggacggacgctacaacttaaacgatctccatgcagcagcagttgcaaatggagaggctacagagcaacagcgcccaagcaagtttttgtgtagcgcgcagataaaacgcttcataaaagcactagaggccaaagtgcaaaaaagcactttgaaacaaattcaaccacttaaaatcattaaaggtggtaccgaacctggtgtgtggggcgttgaactactggcaatcagatatgcagcatggattaagccggaatttgaaatcgaggtttatgaagtttttaaaacgattgtccgtctcggcgttggtgccatgtctcgcctgaacaaaattgaccacatcatcagcactgaaaccaaagcgataagccagtgtgcaagtcaaatggctaagtggggcgttggtgggcgaacaagattgcttcatgttgcacgtgagagagcagcaaatgaagtgcaaatgtatttgcccggaatggtgtgattctgctggttaatccagtttgtacattacggcagtaccgcgaaacaacccaagccagtaagtggggaaataacactggcagccactgaaagatgaacctccagccttatggcaaaaaagattctttgtggtggcggactgatggaaagacatcggttattgcagaggccattcaatgagtggtctagacaatggcttatcccaacaaccggagccaacacaatggcagagattacagcattgacagaattacagcagatgaacctcgatatcctccgtttagttcaaagcgataccgcagcagcagagaaagcgatcgcattcgttgctggaagtaagctgaacttcgaactgttcaaagaccaactggttttggcgcagggtgaaggaacggcattagctcgcgcagaaaaggctattcgtgaggcaaaagaagcgttagacctgttcactgccggagcataacgaatggcaaagacgaagtggcctaaacttccccggttcttcgtgccattgttccatagcgccaatgtctacctgtgtcgttcaaaggaagagtgggatcaggcttgcattcatcttggagttggtagcggcgggaatgagatgctggcgggggcaacacagtcatattgcaataccgaaacaggcgagaatctttacctgcttggtgtattcaatggtgaggcggccacattggttcatgaatgcgctcacgttgcattttatgtctgccgagatgttggtgtaaccacttatcctggcgacgcaaacgaaacctactgctacatgcttgacagaatgttcagtcacttcctgccgttctttcatgaaccagaaaaagaaggagccaagtaatggcaaacccaaacttcacgccatcatggcctctatacaaagatgctgacggtgtatatgtgtctgcgcttccgattaaagctatcaaatacgctaatgacggaagtgcaaacgcagaattcgacggcccgtatgctgaccagtacatgtcagcgcaaacagtagccgtattcaagccggaggttggcggatatctgttccggagccagtacggcgagctgctctatatgagcaagacagcatttgaagctaactacacttctgcaagcggttcagtagctaatgcagagacggcggataagttatctactgcccgcactatcacactaaccggagcggtcacaggttcagcgtcctttgatggttcggctaacgtgactatcgaaacaacatcaggaagttaacttatggcagcaccaaagggcaaccgattctgggaggcccgcagtagccatgggcgtaacccgaaattcgagtcgcctgaggcgctgtgggctgcttgttgtgaatacttcgagtgggtggaggctaacccactatgggagatgaaggctttctcatatcaaggagaagttacacaagagcctattgccaagatgagggcgatgaccatcactgggctaacgctattcctcgatgtgacgcttgagacatggcgacaatacagggtgagagaagacttatctgaggtcgttacgcgagcagagcaaatcatctacgaccagaaattctccggcgcagccgctgatcttctcaacgctaacatcatcgcccgcgatttgggcctcaaagagcagtcgcaatttgaagacgtgacacctgataagggagatcgcgataagcgccgctctcgtatcaaggagctattcaaccgtggaactggacgcgattcttgataacctgagcgacgaagagcaaatcgaattgctcgagctactcgaagaagaagagaactaccgaaatacacacttgctatatgagtttacgccatacagcaaacagcgtgagttcatcgacgcaggtcatgattatccagagcgatgttttatggctggtaaccagcttggtaagtcatttactggcgctgctgaagtcgcgtttcaccttaccgggcgatacccgggaacgaaaggttatccggctgatggtaaatatggcggagagtggaaaggtaagcgtttctatgagccagttgtcttctgggttggcggtgaaacaaacgagactgtaaccaaaacgactcaacgcatcctgtgcgggcgtatcgaagagaatgatgaacctggctatgggtcaatcccgaaagaggacatcattagctggaagaagtctccgttcttccctaatcttgttgatcaccttcttgttaagcaccacacgccagaaggcgtcgaagatggcatctcaatatgctactttaagccttactcacagggccgcgcccgctggcagggcgacacaattcacggcgtctggtttgacgaagagccgccatatagcatctatggcgaaggtcttacccgtacaaacaaatacgggcaattctcaattctgacgtttaccccgctgatggggatgtctgacgttgttaccaagttcctgaagaatcccagtaagtcgcagaaagtggtcaacatgaccatctatgatgctgagcactacaccgacgagcagaaagagcaaatcatagcatcctatcctgagcatgagagagaggcacgtgctcgtggtattcctacgatgggtagcggtcgaatattccagataccggaagagacgattaagtgccagccgtttgagtgtcccgatcacttctatgttatcgacgctcaggacttcggctggaaccacccgcaagctcacattcagctttggtgggacaaagacgcagatgttttctatctggcgcgtgtatggaagaaatcagagaacactgccgttcaggcatggggtgctgttaagtcgtgggctaacaaaatacctgtcgcgtggcctcatgacggtcaccaacacgaaaagggcggtggtgagcaacttaaaacccaatatgcggatgccgggttctctatgcttcccgatcacgcaacgttcccggatggcggtaactcagtagagtcaggcattagtgaacttcgtgacctgatgcttgaaggaagattcaaagcattcaatacatgcgaaccattttttgaagagttccgcctatatcatcgcgatgagaacggcaagattgtcaagaccaacgatgatgtgctcgatgctactcgctacggctacatgatgcgccgcttcgccaggatgatgcgcgatatcagaaagccgaaagaaaagaaaatccccgcaccgattagaccagtacgcagaggacgataatggccgacaatgaaaacaggctggagagtatcctgtcgcgctttgatgcggactggacagccagcgatgaagccagaagggaggccaagaatgatctcttcttctcccgcgtatctcagtgggatgactggctatcacaatacacaaccctgcagtatcgcgggcagttcgatgttgtacgtccagtggtgcgcaagctcgtttctgagatgcgtcagaaccctattgatgttctgtatcgtccaaaggatggagcaagtcctgacgccgctgatgtgctgatgggcatgtatcgcaccgacatgcggcacaatacggcgaaaattgctgtcaacatagccgttcgtgagcagattgaagcaggcgtgggtgcgtggcgtctggtcactgattacgaagaccaaagcccgacgagtaacaatcaggttattcgtcgagagcctatccatagtgcctgctcccatgttatctgggacagcaacagcaaactgatggacaagtctgacgcccgtcactgcacagttatccactcaatgagccagaatggctgggatgatttcgcagaaaaatacgacctcgatgctgataatattccatcattccagaaccccaacgattgggtatttccatggctgacgcaggacacaattcagatcgctgagttttacgaagtggtcgagaagaaagagacggcgtttatctaccaagacccggttacgggtgagccggtaagctactttaagcgcgatattaaagacgtcatcgacgacctggctgatagtggatttatcaaaattgcagagcgccagattaagcgtcgccgggtatacaaatctattatcacctgcaccgcagtactgaaagataagcaactcattgctggagaacatatccccattgttccggtattcggagagtggggcttcgttgaagataaagaagtgtatgagggggtcgtccgcctgacaaaagacggtcagcgtctgcgcaacatgattatgtcgttcaacgccgacatcgtggcccgcaccccaaagaagaagcctttcttctggcctgagcagattgcaggctttgagcatatgtatgacggtaacgacgattacccatactacctgctcaatcgcacggatgagaacaacggagaaatgccaactcagccgctggcatattacgaaaacccggaggtcccgcaagccaacgcctacatgctggaagcagccaccgcggcagtgaaagaggtcgcgacgctaggtgttgatgcagaggcggtaaacggtggacaggtagcctacgacactgttaaccagctaaacatgcgcgctgaccttgagacatacgtgtttcaggataatctggctaccgctatgcgccgtgacggtgagatttaccagtcgatagttaatgacatctacgatgttcctcgcaacgtgacaatcacccttgaggatggtagtgagaaagaggttcagctaatggctgaggttgttgaccttgccactggtgaacggcaggtactgaacgatatcagggggcgctatgagtgctacacggatgttggaccatcattccagtccatgaagcagcaaaaccgctcagaaattcttgagttgctcggcaagacgccgcagggaacgccagaatatcaactgctgttgcttcagtacttcacactgcttgatggcaaaggcgttgagatgatgcgcgattatgccaataagcagcttattcagatgggcgttaagaagccagaaacgcctgaagagcagcaatggttagtagaggcgcaacaagccaaacaaggtcaacaagacccggcaatggttcaggctcagggcgtactcctgcaggggcaggctgaactggctaaagctcagaaccagacgctgtccctgcaaatcgatgcagctaaagtcgaagcgcagaaccagcttaacgctgccagaatcgcagaaatcttcaacaacatggacctcagtaaacaatctgagtttagagagttccttaaaaccgttgcttcattccagcaggaccgcagcgaagacgctcgcgcaaatgctgagttactccttaaaggcaatgaacagacgcacaagcagcgaatggacattgccaacatcctgcaatcgcagagacaaaatcaaccttccggcagtgtagccgagacacctcaataagagagagttaatcatggaaccaaccaccgaaattcaggcaactgaagacttaaccctgtccggcgatcatgcagcggcatctgctgatagcttagttgtcgataatgccaacgacaatgcaggtcaggaagagggctttgagattgtcctgaagtacgatgagacagcaccaaaacaagacccggcaaagaacgcagaattcgcccgccgccgcatcgagcgcaaacgacagcgcgagcttgagcagcagatggaagcagttaaatgcggagaattgccggagagtttacgggtaaaccctgaccttccacctcagccggatattaatgcctatctgtcagaagaaggcctggccaaatatgactatgacaacagccgtgcgcttgccgctttcaatgctgctaataccgaatggctaatgaaagcgcaggacgcccgcagcaatgccgtagcagaacagggccgcaagactcaggagtttacccagaaatcagcgcaatacgtcgaagctgcccgcaaacactatgacgcggcggaaaagctcaatatccctgactatcaggagaaagaagacgcatttatgcaactggttccgcctgcggttggggccgacattatgcgcctgttcccggagaagtccgccgcgctcatgtatcacctgggtgcaaacccggagaaagcccgccagttactggcgatggatgggcagtccgcgctgattgaactcactcgactatccgaacgcttaactctcaagcctcgcggtaaacaaatctcttccgctccccctgctgaccagccgattaccggtgatgtcagcgcagcaaataaagatgccattcgtaaacagatggatgcagctgcgagcaagggagatgtggaaacctaccgcaagctaaaggcaaaacttaaaggaatccgataatggctttgaacgaaggtcaaattgttacactggcggtggatgagattattgaaaccatctccgcaatcactccaatggcgcagaaagccaagaaatacaccccgcctgctgcttccatgcagcgctccagcaataccatctggatgcctgtagagcaggagtcccccactcaggagggttgggatttaactgataaagcgacagggttactggagcttaacgtcgcggtaaacatgggagagccagataacgacttcttccagttacgcgccgatgatttgcgtgatgagacagcgtatcgtcaccgaatccagtccgcagcccgcaaactggctaacaacgttgagctgaaagtcgcaaacatggccgccgagatggggtcattggttatcacttcgccggacgctatcggcactaacaccgcagacgcatggaactttgtggccgatgcagaagaactgatgttctcccgcgaacttaaccgcgacatggggacatcgtacttcttcaacccacaggactacaaaaaggcgggttatgacctgactaagcgcgatatcttcgggcgcattcctgaagaagcgtaccgcgatggcactatccagcgtcaggttgctggcttcgatgatgtcctgcgctctccgaaacttcctgtgctgaccaaatctactgcaactggcatcactgtatccggtgcgcagtccttcaagcctgtcgcatggcaactggataacgatggcaacaaagttaacgttgataaccgttttgctaccgtcaccctgtctgcaactaccggcctgaaacgcggcgacaaaatttcgtttactggcgtgaagttccttggtcagatggctaagaacgtactggcgcaggacgcgactttctccgtagttcgcgttgttgatggtactcacgttgaaatcacgccgaagcctgtagcactggatgatgtttctctttctcctgagcaacgcgcctacgctaacgttaacacctcactggctgatgcaatggcggtgaacatcctgaacgttaaggatgcccgtaccaacgtgttctgggctgatgacgccatccgtattgtgtctcagccgattcctgctaaccacgaattgtttgcaggtatgaaaactacctcattcagcatcccggatgtcggccttaacggtatcttcgctacgcagggtgatatttccaccctgtccggcctgtgccgtattgcgctgtggtacggcgtaaacgcgacacgaccggaagcaatcggtgttggcctgcctggtcagactgcgtaactaacaggggcttcggcccctttcttatttgaggtgacacatgggtgtaatgctatataagcagggtcgtggaacgaaggtatggggcaaggacgttcaggttaaagttgtcgatgacggcgacgtagaagatcaccttgccgatggttgggttaggcatccaaatgaggttccggagactaatgacgagccaatcggtgattcaggcgtggtcaagaaagacatgggtgaagtatctgatggataccacacctttaacgaactatatgcacatcgagtgcgcctgttttcaacactaatgaatgccttccgcgaaagcgcatggtggagctttcagcatcatgacggcgagcaatgggatggatgggtgttagctggcatcgacaccccagaaggcgcggtaacataccacctcccagagagtgaaattgaacatctgcctaaaggcacggaaattgagtttggcaaggaatgggacggccacacggcagatgatgtgttgaatcgtctgctaagcctgcgaccgaaagaaccggcaaccaaagaacgcaaaaagccaggaccaaagcctaaggcggaaagcgatgcagataaagactaaaggcgatctggtcagggcggcgctgcgtaagcttggtgtagcatcagatgcaactctcactgatgttgagccacagtctatgcaggatgccgtagatgaccttgaagcgatgatggctgagtggtatcaggacgggaaaggcattgttaccgggtatgtattctcagatgatgataacccgccatccgaaggtgacgaccacggtcttcgctcaagcgcaatcagcgcagtattccacaatctggcttgcagaattgctccggattatgcgcttgaggctaccgccaaaattatcgcaaccgctaaatatgggaaggagcttctctataagcagaccgccatcgccagagccaaaagagctccttacccgtcacgcatgccaacaggcagcggtaatagtttcgccaatctgaacgaatggcattatttccccggagagcagaatgccgattcaacaactccccatgatgaagggaatgggtaaagacttcaagaatgccgactacattgattacctaccaatcaatatgttggccacaccgaaagaagtactcaactcatcgggttatttacgctcattcccgggcatagcgaagcgcaacgatgtaaatggagtatcgcgcggagttgagtataacaccgctcagaacgctgtatatcgtgtttgtggcggcaagctctacaaaggtgaagccgtagtcggtgatgttgccggaagcggtcgcgtatcaatggcacatggtcgcacatcacaggcggtaggcgttaatggtcagctcatcgagtatcgctatgatggcgcggttaaaaccgtctcaaactggcctgcagacagcggattcacgcagtatgagttaggctcagtccgtgacattactcgcttacgtgggcgttatgcatggtcaaaagacggtacagattcatggtttatcactgaccttgaagatgaatcgcatcctgaccgctacagtgcagaatatcgcgcagaatcgcagcctgacgggataattggcataggttcatggcgagatttcatcgtctgctttggctcgtcgacgatagagtatttctccctgacaggcgcaaccaccgttggcgctgcgttgtatgtcgcgcagccatcgttaatggtacagaaggggattgccggaacatactgtaaaacgccattcgctgattcatatgcattcatcagtcacccggctactggcgcaccttccgtctacatcatcgggtcagggcaggcttcaccaattgcgacggccagtattgagaagattatccgctcatacacagctgaagaactggcgactggtgtaatggagactttgcgcttcgattctcatgagcttctgattattcatctccctcgtcatgttctggtttacgacgcatcgtcaagtcagaacggaccgcaatggtgtgtgctgaaaacagggctttacgatgatgtatatcgtgctgtcgacttcatgtatgaaggcaaccagataacgtgcggcgataaatcagaagcgttgacaggacaattgcaattcgacatcagcagccaatacggactacagcaagaacacctgttgtttacccccctcttcaaagcggacaatgccagatgcttcgacctcgaagttgaatcatccactggtgttgctcaatatgctgaccgcctgtttctgtctgcaaccacggacggaatcaattacggtcgcgaacagatgattgaacaaaatgagccgtttgtgtacgacaagcgtgttatctggaaacgtgttgggcgcattcgtcgattaatcggattcaaactgcgggtaatcaccaaatcaccagtaacactatccgggtgtcaaattcgtctggagtaacatatggcagacccgtcacttaataagcctgtcattattcaggccactcgtcttgatgcctcaatcctcccccgcaacgtcttcagccagtcttatctgctctacgtaatcgcgcagggggctgacgttggcgctattgcgggaaaggcaaacgaagcagggcaaggtgcctatgacgcgcaggtaaagaacgatgagcaggatgttgagcttgcagaccacgaagcgaaaattcagcagttacgcatcgacgtagacgaccatgaaatccgtattactgcaaataccaatgcaattgcggcgctggatgtcagactaaccacggctgaaggagaaatagtcaccttgcaggctgatgtcagtgctcttgatggtagagtgacgacggctgaaggaaatatttctgcattgcaggttgattacgtatcgaaaacagctaccgcaacacaatcgctggcgtcacctctcaacgtgacaacgtcctattcagttggcggtactaaagttatcggtgctcgacagaccggatggacagcagcaacaggcgctgcgcttctcggtgcattcaacgctaaccaggcatacacggtcagtgccacatatacgcagtctgaggtatcagctctggctaccggattgcagcaggcgcgacagcgtatcaaagctctcgaagatgcaatacgaactcatggattaatcaactgatgattacattcattccaacacgcaacatcgacctgatagaaacggtcggcaatcatcccgacatcatcgccgggagtaacaacggtgacggatacgactacaaacctgagtgccgctatttcgaagtgaacgtacatggtcagttcggtggcatcgtgtattacaacgagattcagccgctgacctttgactgccacgccatgtacctgcctgagattcgcggattcagtaaggaaatcgggctgacgttctggcgatatattcttaccaataccaccgttcagtgcgttacatcatttgctgcacgcaaatttcgccacggtcagatgtactgcgcaatgattggtcttaagcgtgtaggaaccatcaagaaatacttcaaaggcgtggatgacgtgacgttttacagcgccacacgcgaagaactaatcgacttcctgaatcacgggagataaacatgttatatgcatttacgctgggcagaaaactgcgcggtgaggaaccttattatcctgaaaaaggcggaaaaggtggcgcagataaaagcgcaaagtatgcagcagaagcgcaaaagtatgccgcagacctgcaaaaccagcagttcaacaccatcatgaacaacctgaagccgtttactcctctggcagataagtatatcggcagtcttgaaggtttatcgtctctcgaaggtcaggggcaggcgcttaataattactataactcccaacaataccaggactttgtggggcaggctcgctatcagaatctggcagcggcagaagcaacaggtggccttggttctacagcgaccagtaaccagcttgcagcaatcgccccaacacttggtcagcaatggctgtcaggtcagatgaataactatcagaaccttgcaaatattggtcttggtgcgcttcaggggcaggcaaacgccggacagacatatgccaacaatatgagccagatttcacagcaaagcgcggctcttgcagcggcaaatgccaacagaccatcagcaatgcaatctgctattggcggaggtgcgtctggtgctattgctggggctggacttgcgaaattaattggttcatcaactccgtggggggctgcgatcggcggcggtcttggtctgcttggctcgttgttttaaggggtaatcaatggctacgtggcaacagggtattaattctggtggttttctggctggcattggtgcgcaaaatgagaacgcgccaaaggcaagcgacattaacgcaacgcttggactgattcgcgaaaacaatgagttggcccgttcaggcgctaataatgtggctttaacagggctgcgtggtctggctggagttgctgatatttataaccaggaacagcaacagaaagcgctaaacgcattcaatcaggttcatgccaacgcatgggctactggcgacaattcaggactcatcaagttcgcgcaggaaaacccggcgtttgttgcacaggcacaacaggcgttttccggtcttaatgagcagcagcgtaacgatatgggcgatttagccatgaaggctaacgtcgctctttctcaggggccggaagcctacagtaaattcattactgataacaaggacaggttaaaccgtgttggcgctaatccagactggatgatccagactggagtacagaatccagaacagctatcacacatgttgactacgatgtctctcggtgcgcttgggacagaaaaggcgtttgctgttcaggataagatggttggtcgccaacttgaaggagaaagaaaccagttaaccgcaagagggcaggatattagtgccgctaccgctcgaagggggcaggatattagtacccaaaactcgctacgttctgcgggcggggcggttccggcatcagtccgtgaatatcagtatttcaatagtttgtcgccagaacaacaaaaaaattatcttcgtgttcgtggcaggccggatgcaggtggggaaaatgttgtgcaattagcagacgggcgtactgttaatgtcaatggcaagctgcatggatctggcgctagtgcattttacgaaggtactgacgataacggaaatatggttcgtgtcccggcaagtgctattgcagcacctccaacgtctgcggcaagcgcacagaactacgcgatgaagaaagatatcgatgcaatcgcaaacgcagatgcttctgctctcgatttcatgactggaatgactggcggagcaggaaatccggcaattggtgcagatgttcgcagccgactcacaggcaaagaacaacgacagttatataactccgcacaacgtattcagggaagaatgcagaatcagggcgtggcagcagcaagagatatgggtgctagcggtatcaacaccattgcagaagcaaagatgtattttcagggtatgccgcaggttgactactcaagcccggaggctatgcagcagtcgattcgtgagattcaggaatacaccaacaattataacaagcagtacaacgttaatgttggtaaatcgcagtatcagcaatctcaacctgtacaggaatcacagcctgcatccaacagcaacttttcttcactatggggtgattaatggctaaggcatggaaagacgttattgcctctcaaaagtaccaggcattagcaccagagcagaaagcacaggcgcaggagcaatacttcaatgaagtagtagcaccgcaagccggaaacgatgccgaacaggctaaacaggctttctatgctgcttatccacctccaacggctcaacaaccagcaaaacaaccacatggaccggcgcagccacagcaacaaggtggcttcatgtctgaccttagcaatgctgctgcggagacggggcgtggattgcttcaggctggcgttaatctggcaaatatcccggcatcaatggctgatgcagtcgccagcgccggggcatgggctggtcagaagcttggcattggtgacggaacttatcagccatcgcctcgcgtcacgacacaaggacttgagcaggactttggcttgcaacaaggtgcgcttactccacagacgacagaaggcaaaatcttctctgaagcactgccatatttgactcctgttggggccgagagaattgcagcgcaggcatcatctattgccggtcgagttgctcagggtgcatcacgcttgttggcggagaacgctgttggttcattggctgcaaacagtgagcgtgataatccaggagcactggcaacagacttaggaactggtgttgcattaggcggggcaataaatcagttaggccgtgccgctggtgctgcttatcgtgggattcgcgggacgatcgcaccagaagcgcagcaggctattcagttcgctaatgctgctgatgttcctttgcatacaactgacgttttgcagccaaattcccgcgtcgggcgcatggcacagaccaccgctgaaaacatcccatttgctggaacaagcactatgcgagctaatcagcaagaagcgcgcagccagttggtagatgaatttgcatcacggtttggtgagtatgatccgtcaattgttattggcagcctgaaggcaaaaacatcaggaattcggaaagcagcagggaaccgtcttgagcaagttcagagcgcaatgacaggagtcaacattcagccaacgcgagcaattcagcagatagatgatgagattggaaaactgcaaaaattaggacaagttgccgacacggatacaattagcaaacttcaggcatacaggaatgaattggctaaaggtgatgttaacctggaacagttaagcagactgagaacgcagtttaggatggatgtcagaggagaaaggacacaaatgccaccgccagctgaggcggcagtgcagcgtgtatacagggcaatgacaggagacattgataactccattggccagaaccttggaaacgacactctgcgcagatacaagcaggccaatgcggtatacgcagatgaggctagtaagctccagaatacccgcttgaagaacgttctgatgaaaggggatctaactcctgaagttgtcaacaacatgttgttcagcaagaataaatcagaagttcagaatctgtaccggtcagtcggtcaggtgggacgcgctcagatgcgtaacggcatcatcggaaaggctatggagaaatcaggcggttctccggatcagttcctgcgccaggttaatttaatgtctacccagacgggaatcgcttttaaaggacgagatgctgcgtatctgaaaggactgaagaactatcttgagtcaaccaagcgtgctggtcaggcaggagtaacaacgcctacaggtcagcaaactataccgttcatcctaggtattggaacggtaactacccctgcgctggtaggtgttggtggcgggtatggtttgctggcaagaatgtatgagagtgaaccagcacgtaatgcaatgcttcgcctggctaatactccacgtggttctaccgcattcgagaaagcgttagccgaagttgagcgggctgttaactctgttgctcaaggtgctaaatcagatgcattaagcgaatagcagtctaccaactacgatgccgaagataaggaatgcaaagttcaataagtctctgttcataaatcctcgtaggaaccaatagagatcattctttgatctatatattatctgaatcccttacttaattgggtgatgataatgaaaaaaggtgtgatggttggctgtttttgtgtatttctcgctgggtgcgctacagcaacaaaaacgtatgctccagatggaagagaggcatataccatagaatgctctggagtaggtggttcatgggctatgtgtcaggccaaggccggagatctttgtggttcaaaaggctatgacctgattagcactggtagtgatcagggagctattgcaaacattgacggaagtactggcaacgcatttgcaacaaacaccatatcaagaagcatgtatatagcttgcaaaaaatgagtaaagcccggttcgccgggctatttttttcgatagaaatctttcaacttttcgaatactaattcttgaatttctctggatacgatgtctgcttcgcgttcagcatcatccctgtatccgattacaggcgtaggcttttcaagtgaatcagccactatctgcactagctctgcatttagtgaccttccgtttgcctttgccctctgcttaaccttttctttcagctcgtagggtagcctgaggttaaattgcgggtcatctcttcccatttctgatgcctcacttttgtaagtggatcagcatcatatgatctactggttgtatccacaataagaccaccgtggtcttaatgacgcattgccgtagccacgctgcgacgattactttcatctggagcacattaaatgacagatatcactgcaaacgtagttgtttctaaccctcgtcccgtcttcactgaatcccgttcgtttaaagctgttgcgaatgggaaaatttacattggtcagattgataccgatcctgttaatcctgccaatcagatacccgtatacattgaaaatgaggatggctctcacgtccagattgctcagccgctaattatcaacgcagccggtaaaatcgtatacaacggccaactggtgaaaattgtcaccgttcagggtcatagcatggctatctatgatgccaatggttctcaggttgactatattgctaacgtattgaagtacgatccagatcaatattcaatagaagctgataaaaaatttaagtattcagtaaaattatcagattatccaacattgcaggatgcagcatctgctgcggttgatggccttcttatcgatgttgattatcatttttataatggagagaaagttgattttggtggtaaggttctgactatagaatgtaaagctaagtttataggagatggaaatcttatttttacgaaattaggcaaaggttcccgcattgccggggtttttatggaaagcactacaacaccatgggttatcaagccttggacggatgacaatcagtggctaacggatgccgcagcggtcgttgccactttaaaacaatcgaaaaccgatgggtatcagccaaccgtaagcgattacgttaaattcccaggaatagaaacgttactcccacctaatgcaaaagggcaaaacataacgtctacgttagaaattagagaatgtataggggtcgaagttcatcgggctagcggtctaatggctggttttttgtttagagggtgtcacttctgcaagatggtagacgccaataatccaagcggaggtaaagatggcattataaccttcgaaaaccttagcggcgattggggtaagggtaactatgtcattggcggacgaaccagctatggatcagtaagtagcgcccaatttttacgtaataatggtggctttgaacgtgatggtggagttattgggtttacttcatatcgcgctggggagagtggtgttaaaacttggcaaggtactgtgggctcgacaacctctcgcaactataatctgcaattccgcgactcggtcgttatttaccccgtatgggacggattcgatttaggtgctgacactgacatgaatccggagttggacaggcctggggactaccctataacccaatacccactgcatcagttacccctaaatcacctgattgataatcttctggttcgcggggcgttaggtgtaggttttggtatggatggtaagggcatgtatgtgtctaatattaccgtagaagattgcgctggctctggcgcgtacctactcacccatgaatcagtatttaccaatatagccataattgataccaatactaaggatttccaggctaatcagatttatatatctggggcttgccgtgtgaacggtttacgtttaattgggatccgctcaaccgatgggcagggtctaaccatagacgcccctaactctaccgtaagcggtatcaccgggatggtagacccctctagaattaatgttgctaatttggcagaagaagggttaggtaatatccgcgctaatagtttcggctatgatagcgcagcgattaaactgcggattcataagttatcaaagaccttagatagcggagcattgtactcccacattaacggggggcccggttctggctcagcgtggactcaacttactgctatttcaggtaacacacctgacgctgtatcattaaaagttaaccacaaagattgcaggggggcagagataccatttgtccctgacatcgcgtcagatgattttataaaggattcctcatgttttttgccatattgggaaaataattctacttctttaaaggctttagtgaaaaaacccaatggagaattagttagattaaccttagcaacactttagatatgtaataaaaatgggtgtaaacacccatttttattttatggtaaatgttctatagctaattaaacctaacaactatggtttcccctacaacaccaatatcgtatacgttattaccagattttttccacccattttcaagtttcacctctttgtcatatagtctgtaatttctggagaacacatttctttgcattaacacctctgaccacatccaattattgttaataatgcgtggtattaactctctcattaaaggatgctttattactatgttttcatttattgatgcatacggttctgtgccaatgaattttatatttttcttgtctcttccaaatccaagatgatctatgtcttgagatattctatttacaatgctttcctcaagctgaaactgtgcatttatggcattgtaagcaccataagaaaatattgttgatattaaaagaataaaagaaaaatatattcttgatattaactgcttatcttcaaaagcatagaatacgcataggcaacaaaaaaacataaagccacccataccaatcaataccctcggtgcgtatattggtgattttagaaaaatcattggtccaatgatgaaaaacattgatgccaataaaattaaaactactagcaagaactttgttttcttattttcatctcttttgattacttttaaaactatgactatcaaagaaatgattagcgcaaagaatagcgagtagtagattaagtaattatcgccattcaagatcgtgctaaacattctataaaatgataagacgttagaaattatcccttcaaataaacttgagtttatctctataatcttactatgttcgatattgtaagaacctgttacaagtctttttgcaataaagtaagaataggcaaaatatcctactattaaaccagcgacagaagatgctgtattttttgtgatatttgaaattgagtttttcttaaccacatctgaaattataaaggccaacaagaatattgcgtaagtattcagcgcagcctgataaagactaaggaatgcaatggttaaaatggatgatattatgatatttataggcttgtattgataagcgacatacgatgagataatagatattgccacactcatgcacattgttaatgaatcatatctatatgatagattttcaataaagaatgggtttgccaaaatcatcataaaacaaagagatgctgtgatgtagtcatctccaaacagcttttccctgatgcaggatagtgccaatgctaaaataactatccctagcattaaaggtagcggagaagcatctataattggggttccaaaattaatgatatagaaaataaagtcggaaagtgggcgaccattgcctgaccaacccaacccgccatataaagacctacccaagtcatcaacgaaaaatgattgatgtgtcaataaaggaaatgtatatataatcgccaatccaagaaagattgatataaatatcctgtcattactattaaatttcacttttaaaacccttacgctttaatatgtatttaggccgctgtttggtttctatgtaaattctaccaatatattctccaagaatacctattcctatcaattgaacgccacccaggaaaagaacagaaacaagaagagacgggtagccaggaacattatttccaaatattaatttatcaataatcatccatgcaccgtaaaggaatgacatacctgcaataaacaatccaatgtaagtccatatgcggagcggaaatgttgagaaagaagttattccctccagcgccaggttccataatttccagccgttgaatttcgaatcaccggccacgcgttcggcacgggcatatttaacaacatccgtttttccgccaacccaactgagcacacccttcataaacaagttgcgttctggcatttgtttgatgttctcgacaaccgcacggctcattaaccgaaagtcgccaacattttcttcgatttttggattgctgattttattgtgcagcttataaaaccactcagctgtcttacgcttcaacctcccatcagttgagcggtctgagcgcttagccagcaccatatccgcgccagcctgccacttctcaatgagatgagggataacttctatcggatcctgtaaatcgacatcaataggaatgaccgcatctccggttgcatggtcgagacccgcgaaaagagcaggttctttaccgaagtttcgcgtaaacgaaagcggaataacgagcggatcagatgcggctattttgttaattattgattcagtcgcatctttactaccatcattaataaaaacgatctcaatttcatattcttttagctcattaaactcacgtaccgttttatagaaaatcggtatcgtgtcttcttcgttaaaaactggaacgacaagagagattttcatcttatatccctgaaaacaatgaatctggaatagataaagccgcataccaggctaattgccgagaaagtgataagggtaatcaatggtggcaaggaacattggtcagccatccagccaacaacagcgctcagtgttcccatgaatcccacatacatcatgtagcgaagcgtggtggtggtggcattaaaggtgaaacgcgcattggcatagaagctgaacgatacggcgataacaaaaccggaaaagttcgccagcgcctgatgcgtatgcatcccatacacacaaaaagcaaatacgccccaatgaataagcgtgttaagaacaccgatcgatgtgtacttagcgaataacttcaacattatgaaaatcagcggattcggaaaggtctggagtgtagcactacaaattactttgatcgatataaacgatcaataatgtaaactttgatagtttaaagttattgtttgctcgttaattgatcgttgttaccgatcaatttttattgctgattgctaagtggtttgggacaaaaacgggacacacaaagctttgcatcggcttgcaaggctttgcatgtttttcgaagatgggacgtgtgagcgcaggtatgacgcggtatgttgttgacttaaaaggtagttcttataattcgtaatgcgaaggtcgtaggttcgactcctattatcggcaccagttaaatcaaatacttacgtattattcgtgccttccttatttttactgtgggacatatttgggacagaagtaccaaaaatcgagtcaatttgtcgagcatgttcagtcaggtgatttggtgccagatgagcatatctgcgaaccatttcgatagactcccagccacccatttcctgcaataccgaaatcggaacgccagcctgaactaaccagcttgcccacgtgtgcctcaggtcatgaaaacggaagtcttcaatgcctgctcgttttaatgctgacctccatgcagtattagcgtcatagcgcatcttcctcactacaggtgatttagttccgtctggcttggtgctgctttccttgtagacgaacacccatttgtgatgattgcctatttgctttttcagcacccggcaagcagtatcattcagcgccacgccaatggcctgattggacttactttgttccgggtgtatccatgccacctttcgctgcatgtctatctgctgccaatccatattgataatgttagaccgccttaagccagtagaaagcgcaaactctacgactgactttagcggttccgggcattcatcaatcaacctttttgcctcgtgaggctcaagccagcggatacgcttatttttcggctgaggaactttgatgatcggagccttatccagcatcttccattcgcgttcagcagcccggaggagtgccttaatgaatgaaaggtgagttgcttttgtggctactgctgccggcttaggcttgaatactggaggctgcttcccattcttcctgcaagcttcatccattaacttccagttttcctcatgccgccgattagtcatcttctggatggcggagtaaatcttcgtctcggtaatatccttcaactgcatccctgcaaaatgctggagccagaatcctatccgactcttgtcatcatccagcgacttcttatgcgccttctcctctaaccacctgacacaggcctcctcaaaagtcatgtcaggcgtctctcctaatttatttaccctccatgcttctgccttcagtttgtcatgaagctctgtggcctgccttttgtcctttgtcccaagagactgcttaaatcttttgccgttcggcaatgtgaaactggcgtaccaggtttcacctctgcggaatagtgacatttcagttcctctgttatgtcatcacccgcgctcacctggacagtatgcagcggagattgaagtgccgcaacgcaggcttgtcgtgtggtgaggtaaggggatttaggtttggaagggtctttgcgtgttgcctgaaggcggcctgtgcgaatccagtttgtagcggtaggtctggatatcttgagaaatgcacaggcctcatcgagtgtgaggctgtgtgattccatagttactttcctaatactgaagcgagaagagcaatctctacaagaagctcaataaatccaaaaattgctatacctgcgtaaaccgcgccatcaatatccccgcggcgacaaagataggtggcactgatcacaagaatcatcattcactccataaaacaaaactcgccgtagcgagctcagataaaagaaatccccgcgagtgcgaggattgttattcattgccgatattcatctttatcgcgaacacctttaccggtttatcgccgaagtgcggatgtgtgattgtcttgatttcatatccgtcatacgggacgtcaattctgcggctggaatcgtcgcgcttcggatatccctttgtgataatcaggcggtcatactcccggaacataattcgcttattccagtagtcattacacaggcgatactcttccgttttctctccgcgaatcatggcatcgaagtattcacctttgacggcaagttgcaggttagccacgaccttcctcctttggcttgtgaatttgtatcgtcatgccgctttgagtggtgactacaacgacagaaccaggctgaaggctgttaagattgaatgcttcgtaaaacgaatccaatgccagtgcttttttattctttcggttccaccaacgccatcccttgctacaggctacactgacaatccactgtccactcctgtaagccatataaaaccagatgagcaaaacctgaaggaaggctatccagtcaataatcgtatatttcgcgaaggggtccatcacttcacctcctgcggtggctccggtagcggcatccagtgtgacggctcacataccccctcaacaccgttcatgtaaaagaattgaaataaccctttacctttgtgaaaccctaccatctgctcttttgtgtctgaacaataaaccaaaacatcttcttcgtttggcattcgctcactacagcttatccaaccatccggagttgccggatagctgcccgatagctcgttcaacttgtaagtttggcttacgggttcggcttccagttccgctatgcgcttttttgctgcttcaagctcaaagcgcagcttacctaccgtaagcgcaatatcctcgttctcctggtcgcggcgtttgatgtattgctggtttctttcccgttcatccagcagtgccagcacagtagccggattggctgcagcgatgaattcagcattggcctgctgttccatttggaaatcttcatcgaaaccgctttcaggatgcgctccttcaattctgcaaatgggaagatatccaacaacttcacgatgaattagcgcatcaccagcatcaaatctctcctctccatattcgagcgaccacacaccacacgttgctttctctgccttttcacgcagtgcctgatagtcaatcttgctcactggttgcctcctttgctcgctgattccactctgctctaacctctgaataaaaaatcgcgcagtcatttccaggcgccgcatatttgctaccagattgagcgcgacacgtaccgcatcgaacgaaatagaatcgaccgccagagccatattcagggtgatctgcttcgctggcaacgtgcgccgcgccgccacagaatggacatggtagtaggttggtcatgaatgcactcccttgcgaagttggtctgcacaatgcagcagggcgtccgtcgcttctttcaccgtaacgatgtcgccatcgtccagcccgacaaccgtagcgtccttaacgaacgccgagcaaaggtcattaaacgcctgcgcacgcacttcatccaggaaagcgtcggtggctggggtatcagtgaaatcgtccacccacgtatctccaacgtcctcgcactcgcgacgacaatattcgttgaattcgacctctgattttttcagtgccgcattctccgaagccagcgccgaaaacttctcgtgtgccaacttaacagccgaatcagcctgcttaattgactcaatcgctctctggtggtcttcggccagcgcggaaatcttggcctccgcttcagcaaatttacgcaccagatattcagcgtttgtttcgttaacctttaaatctcgtgggatgcatttacctttcagaaatccatccatctcaattagtgtcatttgtttcatttcttcccactccgccacatcgcattcagatatttgttttgattcactgatggaaaactctttctcgccagcatttcttcgcgtggaatatcgttgatgggcttgaagcggtgtcgaataatcatttccgatggaaggattccttggtcgtaggacaaacctctcatgatgaatccctcagttattgctgatagcgccgtaacgcgaacggtaatttttaaggcgcgggtctatttcaatgaatttggtgtaagtggcttttcggaatggtcggattgctgtttcgtttattcggtctttttcctgtttttctgcgagttgtatatcgcgtcggtacttccgttctgcttttgtttccggtggcagagcaagaaacgcgtcgagattgtttttgatattttccagcacctccgacttggagctaccggagcagttgcgcgggtcatccgcaccatatagaggtgcaggcataatttactccagggtaggttatccgaataatgtggtacgtatagggttatttctttcgtaaacgtgatagcctgctttttaccgactcttcacttcgcccgagaatttttgctacatttctttgtgtatagcctgatgagataagcgtctgcattcttttgtcttcgtcgtcgctccatcttggcttaacgaatgccgtttttaatgacagtttttttgctatgtaataaaactgatttatgtttaggcccagatgttctgctgcacggcaagctaccatgcgaccgcaaactgactccatctcagctggagttatgtttaatcttctcattaagccacctgtttaagctcatttattctgatattcattacctgaacgcattttgtctgcgcatcatcgtgaccagccaataattgccagtcatgctgatatctctcaattagctttttcttgtcagtttctgttgctgcataatcgctgaagtctttcaggatttgttcgcagtcaaccgatggagatttctggttggtattttctggtgatggttgattgcatgatgctggcatggcccagtccggcagcgatggagggagccagtaaaatcctgttccatccttcagttttgccctgtgccatccttgtttcttatctctggatatctgcgcaaatccttcctcaagattatacagataccgtcctattccccactgaacggctgcgcgcttcattgctcctgaacgaccgcctttgacggcttctacctgcgtgttttcagcggcatcccatttagttacccattcggaatcaatcttgattgatattccgcattcaacgccgccattgtttggaatatcgcgatattcattgcgccatccggcctttccgcaaacatcgtccaggcgtttcatgattgccctgttcgtgacataagccagcaccatagcccataacttcccatcgcgtgttttcccgctttgctgtattcgccactcaatatcttcagcagcgaacggttcatctaacagatccagattcatgagtaataccccgcaaattcatcccagctaataatcggattctgccgttctgcggctaagttaatttgctgctccacttcttcctcaatttcaggaggaatgagggcaataaactcgttatcatcaaaatcatgcaacatgacgcgcctcccattcttcgtcctgccacttatcccaaccaagagctattcctgcagcccatgtatacgcatcagacattccctgttttgtatccggaaatactttctcatatagcttgttgaactccctgtttccttgctgaacaagaattgttccgttaacaggcgtaatggtcatggcgtggtactcctggctgattaagaatttcaccgagacgtttccatccggcccgtaattttctggtgatacgctctaaaagtgattcattaagttgggcgatacccatgacggcaccgcccgcgatagcaaatgtcatcgtgggactctccattttcatttattggcatagctaaaacgcctcgatatgaagcgctgtggatatgcgataaaacagccgcactcaggcggctgttgttgtttcttctttcaggctttcgatatattcacgcgggtcgtcgtaacactggcattcgctataccaatccacccagcgatccgtaagctccatttcttccaaatcctggtcagtaaggctctcatcccacatctcaaggccgttagcgttgcagtaatcaggtttgatgttgttgtcatactgaaatgcgtcataatcagccagtgcatccatcactcgcacaccctcttcaacacttgctacttctacaatgaatggcttcataggaacttgcgggatatgccagacacgtaatttcatatttcccccaggtaaaaagaatgccgcccatatagagcggcaaataacatcaagggatgatttttcgattaaccagaacgagtcgtcgtcctcgtttggttacgagcgatattgctcacaatgaccactattaaaatggtcattaggtgcttattcgctgacaaatttggtaagactttcgtgtagcgaaaccagaatttcatcatcaaacccatcaagtaatgcttgttcgataagttttataatttctgatgcctgctctttatttatttccatcactcctccccaagagccttgctgatggctgcgcgagctttattgattaccccgtaccactccggataagtcacattgcgtccttctgccatcgctttttcagccaattgaagagcctcgagcaaatcaggagatgctgctatcaagtgtgcattggcctcacattcagctacgcgattttcgtcatgggtcatgataaaaccaagctgcaacccagctctatcttgcctgcaaatgcgtacatcctttccgctccaaggacctggcgtacctttaaactttttcatattcacctctgtgtctcgctgccaaaaatacgcttactcagttacttcatctgcatattctttacttgttaaccaatccgggcgttcacctttaccaatatagaaatcgataatgtccagaagacgtggataaaatttaagagctttacgaccatccatctcagcaatttcctgcttactatattttctccattcctcaactgtgtggttctggcatcctgctcgtacatattcaccgttcgttatacttatgaagtatttctcacccagaattacgaaagtgagatcaggcaggtcggcatcgcgcaggtcggcaccgcacaggtcggcatcgcgcaggtcggcaccgcgcaggttggcaccgtacaggtcggcaccgtacaggttggc

SEQ ID NO: 5 - DNA, 41199 bp, unidentified
  source 1..41199: mol_type = unassigned DNA
  misc_feature 1..41199: note = the genomic sequence of a bacteriophage
cctgtgcggtgccgacctgcgcgatgccgacctgcctgatctcactttcgtaattctgggtgagaaatacttcataagtataacgaacggtgaatatgtacgagcaggatgccagaaccacacagttgaggaatggagaaaatatagtaagcaggaaattgctgagatggatggtcgtaaagctcttaaattttatccacgtcttctggacattatcgatttctatattggtaaaggtgaacgcccggattggttaacaagtaaagaatatgcagatgaagtaactgagtaagcgtatttttggcagcgagacacagaggtgaatatgaaaaagtttaaaggtacgccaggtccttggagcggaaaggatgtacgcatttgcaggcaagatagagctgggttgcagcttggttttatcatgacccatgacgaaaatcgcgtagctgaatgtgaggccaatgcacacttgatagcagcatctcctgatttgctcgaggctcttcaattggctgaaaaagcgatggcagaaggacgcaatgtgacttatccggagtggtacggggtaatcaataaagctcgcgcagccatcagcaaggctcttggggaggagtgatggaaataaataaagagcaggcatcagaaattataaaacttatcgaacaagcattacttgatgggtttgatgatgaaattctggtttcgctacacgaaagtcttaccaaatttgtcagcgaataagcacctaatgaccattttaatagtggtcattgtgagcaatatcgctcgtaaccaaacgaggacgacgactcgttctggttaatcgaaaaatcatcccttgatgttatttgccgctctatatgggcggcattctttttacctgggggaaatatgaaattacgtgtctggcatatcccgcaagttcctatgaagccattcattgtagaagtagcaagtgttgaagagggtgtgcgagtgatggatgcactggctgattatgacgcatttcagtatgacaacaacatcaaacctgattactgcaacgctaacggccttgagatgtgggatgagagccttactgaccaggatttggaagaaatggagcttacggatcgctgggtggattggtatagcgaatgccagtgttacgacgacccgcgtgaatatatcgaaagcctgaaagaagaaacaacaacagccgcctgagtgcggctgttttatcgcatatccacagcgcttcatatcgaggcgttttagctatgccaataaatgaaaatggagagtcccacgatgacatttgctatcgcgggcggtgccgtcatgggtatcgcccaacttaatgaatcacttttagagcgtatcaccagaaaattacgggccggatggaaacgtctcggtgaaattcttaatcagccaggagtaccacgccatgaccattacgcctgttaacggaacaattcttgttcagcaaggaaacagggagttcaacaagctatatgagaaagtatttccggatacaaaacagggaatgtctgatgcgtatacatgggctgcaggaatagctcttggttgggataagtggcaggacgaagaatgggaggcgcgtcatgttgcatgattttgatgataacgagtttattgccctcattcctcctgaaattgaggaagaagtggagcagcaaattaacttagccgcagaacggcagaatccgattattagctgggatgaatttgcggggtattactcatgaatctggatctgttagatgaaccgttcgctgctgaagatattgagtggcgaatacagcaaagcgggaaaacacgcgatgggaagttatgggctatggtgctggcttatgtcacgaacagggcaatcatgaaacgcctggacgatgtttgcggaaaggccggatggcgcaatgaatatcgcgatattccaaacaatggcggcgttgaatgcggaatatcaatcaagattgattccgaatgggtaactaaatgggatgccgctgaaaacacgcaggtagaagccgtcaaaggcggtcgttcaggagcaatgaagcgcgcagccgttcagtggggaataggacggtatctgtataatcttgaggaaggatttgcgcagatatccagagataagaaacaaggatggcacagggcaaaactgaaggatggaacaggattttactggctccctccatcgctgccggactgggccatgccagcatcatgcaatcaaccatcaccagaaaataccaaccagaaatctccatcggttgactgcgaacaaatcctgaaagacttcagcgattatgcagcaacagaaactgacaagaaaaagctaattgagagatatcagcatgactggcaattattggctggtcacgatgatgcgcagacaaaatgcgttcaggtaatgaatatcagaataaatgagcttaaacaggtggcttaatgagaagattaaacataactccagctgagatggagtcagtttgcggtcgcatggtagcttgccgtgcagcagaacatctgggcctaaacataaatcagttttattacatagcaaaaaaactgtcattaaaaacggcattcgttaagccaagatggagcgacgacgaagacaaaagaatgcagacgcttatctcatcaggctatacacaaagaaatgtagcaaaaattctcgggcgaagtgaagagtcggtaaaaagcaggctatcacgtttacgaaagaaataaccctatacgtaccacattattcggataacctaccctggagtaaattatgcctgcacctctatatggtgcggatgacccgcgcaactgctccggtagctccaagtcggaggtgctggaaaatatcaaaaacaatctcgacgcgtttcttgctctgccaccggaaacaaaagcagaacggaagtaccgacgcgatatacaactcgcagaaaaacaggaaaaagaccgaataaacgaaacagcaatccgaccattccgaaaagccacttacaccaaattcattgaaatagacccgcgccttaaaaattaccgttcgcgttacggcgctatcagcaataactgagggattcatcatgagaggtttgtcctacgaccaaggaatccttccatcggaaatgattattcgacaccgcttcaagcccatcaacgatattccacgcgaagaaatgctggcgagaaagagttttccatcagtgaatcaaaacaaatatctgaatgcgatgtggcggagtgggaagaaatgaaacaaatgacactaattgagatggatggatttctgaaaggtaaatgcatcccacgagatttaaaggttaacgaaacaaacgctgaatatctggtgcgtaaatttgctgaagcggaggccaagatttccgcgctggccgaagaccaccagagagcgattgagtcaattaagcaggctgattcggctgttaagttggcacacgagaagttttcggcgctggcttcggagaatgcggcactgaaaaaatcagaggtcgaattcaacgaatattgtcgtcgcgagtgcgaggacgttggagatacgtgggtggacgatttcactgataccccagccaccgacgctttcctggatgaagtgcgtgcgcaggcgtttaatgacctttgctcggcgttcgttaaggacgctacggttgtcgggctggacgatggcgacatcgttacggtgaaagaagcgacggacgccctgctgcattgtgcagaccaacttcgcaagggagtgcattcatgaccaacctactaccatgtccattctgtggcggcgcggcgcacgttgccagcgaagcagatcaccctgaatatggctctggcggtcgattctatttcgttcgatgcggtacgtgtcgcgctcaatctggtagcaaatatgcggcgcctggaaatgactgcgcgattttttattcagaggttagagcagagtggaatcagcgagcaaaggaggcaaccagtgagcaagattgactatcaggcactgcgtgaaaaggcagagaaagcaacgtgtggtgtgtggtcgctcgaatatggagaggagagatttgatgctggtgatgcgctaattcatcgtgaagttgttggatatcttcccatttgcagaattgaaggagcgcatcctgaaagcggtttcgatgaagatttccaaatggaacagcaggccaatgctgaattcatcgctgcagccaatccggctactgtgctggcactgctggatgaacgggaaagaaaccagcaatacatcaaacgccgcgaccaggagaacgaggatattgcgcttacggtaggtaagctgcgctttgagcttgaagcagcaaaaaagcgcatagcggaactggaagccgaacccgtaagccaaacttacaagttgaacgagctatcgggcagctatccggcaactccggatggttggataagctgtagtgagcgaatgccaaacgaagaagatgttttggtttattgttcagacacaaaagagcagatggtagggtttcacaaaggtaaagggttatttcaattcttttacatgaacggtgttgagggggtatgtgagccgtcacactggatgccgctaccggagccaccgcaggaggtgaagtgatggaccccttcgcgaaatatacgattattgactggatagccttccttcaggttttgctcatctggttttatatggcttacaggagtggacagtggattgtcagtgtagcctgtagcaagggatggcgttggtggaaccgaaagaataaaaaagcactggcattggattcgttttacgaagcattcaatcttaacagccttcagcctggttctgtcgttgtagtcaccactcaaagcggcatgacgatacaaattcacaagccaaaggaggaaggtcgtggctaacctgcaacttgccgtcaaaggtgaatacttcgatgccatgattcgcggagagaaaacggaagagtatcgcctgtgtaatgactactggaataagcgaattatgttccgggagtatgaccgcctgattatcacaaagggatatccgaagcgcgacgattccagccgcagaattgacgtcccgtatgacggatatgaaatcaagacaatcacacatccgcacttcggcgataaaccggtaaaggtgttcgcgataaagatgaatatcggcaatgaataacaatcctcgcactcgcggggatttcttttatctgagctcgctacggcgagttttgttttatggagtgaatgatgattcttgtgatcagtgccacctatctttgtcgccgcggggatattgatggcgcggtttacgcaggtatagcaatttttggatttattgagcttcttgtagagattgctcttctcgcttcagtattaggaaagtaactatggaatcacacagcctcacactcgatgaggcctgtgcatttctcaagatatccagacctaccgctacaaactggattcgcacaggccgccttcaggcaacacgcaaagacccttccaaacctaaatccccttacctcaccacacgacaagcctgcgttgcggcacttcaatctccgctgcatactgtccaggtgagcgcgggtgatgacataacagaggaactgaaatgtcactattccgcagaggtgaaacctggtacgccagtttcacattgccgaacggcaaaagatttaagcagtctcttgggacaaaggacaaaaggcaggccacagagcttcatgacaaactgaaggcagaagcatggagggtaaataaattaggagagacgcctgacatgacttttgaggaggcctgtgtcaggtggttagaggagaaggcgcataagaagtcgctggatgatgacaagagtcggataggattctggctccagcattttgcagggatgcagttgaaggatattaccgagacgaagatttactccgccatccagaagatgactaatcggcggcatgaggaaaactggaagttaatggatgaagcttgcaggaagaatgggaagcagcctccagtattcaagcctaagccggcagcagtagccacaaaagcaactcacctttcattcattaaggcactcctccgggctgctgaacgcgaatggaagatgctggataaggctccgatcatcaaagttcctcagccgaaaaataagcgtatccgctggcttgagcctcacgaggcaaaaaggttgattgatgaatgcccggaaccgctaaagtcagtcgtagagtttgcgctttctactggcttaaggcggtctaacattatcaatatggattggcagcagatagacatgcagcgaaaggtggcatggatacacccggaacaaagtaagtccaatcaggccattggcgtggcgctgaatgatactgcttgccgggtgctgaaaaagcaaataggcaatcatcacaaatgggtgttcgtctacaaggaaagcagcaccaagccagacggaactaaatcacctgtagtgaggaagatgcgctatgacgctaatactgcatggaggtcagcattaaaacgagcaggcattgaagacttccgttttcatgacctgaggcacacgtgggcaagctggttagttcaggctggcgttccgatttcggtattgcaggaaatgggtggctgggagtctatcgaaatggttcgcagatatgctcatctggcaccaaatcacctgactgaacatgctcgacaaattgactcgatttttggtacttctgtcccaaatatgtcccacagtaaaaataaggaaggcacgaataatacgtaagtatttgatttaactggtgccgataataggagtcgaacctacgaccttcgcattacgaattataagaactaccttttaagtcaacaacataccgcgtcatacctgcgctcacacgtcccatcttcgaaaaacatgcaaagccttgcaagccgatgcaaagctttgtgtgtcccgtttttgtcccaaaccacttagcaatcagcaataaaaattgatcggtaacaacgatcaattaacgagcaaacaataactttaaactatcaaagtttacattattgatcgtttatatcgatcaaagtaatttgtagtgctacactccagacctttccgaatccgctgattttcataatgttgaagttattcgctaagtacacatcgatcggtgttcttaacacgcttattcattggggcgtatttgctttttgtgtgtatgggatgcatacgcatcaggcgctggcgaacttttccggttttgttatcgccgtatcgttcagcttctatgccaatgcgcgtttcacctttaatgccaccaccaccacgcttcgctacatgatgtatgtgggattcatgggaacactgagcgctgttgttggctggatggctgaccaatgttccttgccaccattgattacccttatcactttctcggcaattagcctggtatgcggctttatctattccagattcattgttttcagggatataagatgaaaatctctcttgtcgttccagtttttaacgaagaagacacgataccgattttctataaaacggtacgtgagtttaatgagctaaaagaatatgaaattgagatcgtttttattaatgatggtagtaaagatgcgactgaatcaataattaacaaaatagccgcatctgatccgctcgttattccgctttcgtttacgcgaaacttcggtaaagaacctgctcttttcgcgggtctcgaccatgcaaccggagatgcggtcattcctattgatgtcgatttacaggatccgatagaagttatccctcatctcattgagaagtggcaggctggcgcggatatggtgctggctaagcgctcagaccgctcaactgatgggaggttgaagcgtaagacagctgagtggttttataagctgcacaataaaatcagcaatccaaaaatcgaagaaaatgttggcgactttcggttaatgagccgtgcggttgtcgagaacatcaaacaaatgccagaacgcaacttgtttatgaagggtgtgctcagttgggttggcggaaaaacggatgttgttaaatatgcccgtgccgaacgcgtggccggtgattcgaaattcaacggctggaaattatggaacctggcgctggagggaataacttctttctcaacatttccgctccgcatatggacttacattggattgtttattgcaggtatgtcattcctttacggtgcatggatgattattgataaattaatatttggaaataatgttcctggctacccgtctcttcttgtttctgttcttttcctgggtggcgttcaattgataggaataggtattcttggagaatatattggtagaatttacatagaaaccaaacagcggcctaaatacatattaaagcgtaagggttttaaaagtgaaatttaatagtaatgacaggatatttatatcaatctttcttggattggcgattatatatacatttcctttattgacacatcaatcatttttcgttgatgacttgggtaggtctttatatggcgggttgggttggtcaggcaatggtcgcccactttccgactttattttctatatcattaattttggaaccccaattatagatgcttctccgctacctttaatgctagggatagttattttagcattggcactatcctgcatcagggaaaagctgtttggagatgactacatcacagcatctctttgttttatgatgattttggcaaacccattctttattgaaaatctatcatatagatatgattcattaacaatgtgcatgagtgtggcaatatctattatctcatcgtatgtcgcttatcaatacaagcctataaatatcataatatcatccattttaaccattgcattccttagtctttatcaggctgcgctgaatacttacgcaatattcttgttggcctttataatttcagatgtggttaagaaaaactcaatttcaaatatcacaaaaaatacagcatcttctgtcgctggtttaatagtaggatattttgcctattcttactttattgcaaaaagacttgtaacaggttcttacaatatcgaacatagtaagattatagagataaactcaagtttatttgaagggataatttctaacgtcttatcattttatagaatgtttagcacgatcttgaatggcgataattacttaatctactactcgctattctttgcgctaatcatttctttgatagtcatagttttaaaagtaatcaaaagagatgaaaataagaaaacaaagttcttgctagtagttttaattttattggcatcaatgtttttcatcattggaccaatgatttttctaaaatcaccaatatacgcaccgagggtattgattggtatgggtggctttatgtttttttgttgcctatgcgtattctatgcttttgaagataagcagttaatatcaagaatatatttttcttttattcttttaatatcaacaatattttcttatggtgcttacaatgccataaatgcacagtttcagcttgaggaaagcattgtaaatagaatatctcaagacatagatcatcttggatttggaagagacaagaaaaatataaaattcattggcacagaaccgtatgcatcaataaatgaaaacatagtaataaagcatcctttaatgagagagttaataccacgcattattaacaataattggatgtggtcagaggtgttaatgcaaagaaatgtgttctccagaaattacagactatatgacaaagaggtgaaacttgaaaatgggtggaaaaaatctggtaataacgtatacgatattggtgttgtaggggaaaccatagttgttaggtttaattagctatagaacatttaccataaaataaaaatgggtgtttacacccatttttattacatatctaaagtgttgctaaggttaatctaactaattctccattgggttttttcactaaagcctttaaagaagtagaattattttcccaatatggcaaaaaacatgaggaatcctttataaaatcatctgacgcgatgtcagggacaaatggtatctctgcccccctgcaatctttgtggttaacttttaatgatacagcgtcaggtgtgttacctgaaatagcagtaagttgagtccacgctgagccagaaccgggccccccgttaatgtgggagtacaatgctccgctatctaaggtctttgataacttatgaatccgcagtttaatcgctgcgctatcatagccgaaactattagcgcggatattacctaacccttcttctgccaaattagcaacattaattctagaggggtctaccatcccggtgataccgcttacggtagagttaggggcgtctatggttagaccctgcccatcggttgagcggatcccaattaaacgtaaaccgttcacacggcaagccccagatatataaatctgattagcctggaaatccttagtattggtatcaattatggctatattggtaaatactgattcatgggtgagtaggtacgcgccagagccagcgcaatcttctacggtaatattagacacatacatgcccttaccatccataccaaaacctacacctaacgccccgcgaaccagaagattatcaatcaggtgatttaggggtaactgatgcagtgggtattgggttatagggtagtccccaggcctgtccaactccggattcatgtcagtgtcagcacctaaatcgaatccgtcccatacggggtaaataacgaccgagtcgcggaattgcagattatagttgcgagaggttgtcgagcccacagtaccttgccaagttttaacaccactctccccagcgcgatatgaagtaaacccaataactccaccatcacgttcaaagccaccattattacgtaaaaattgggcgctacttactgatccatagctggttcgtccgccaatgacatagttacccttaccccaatcgccgctaaggttttcgaaggttataatgccatctttacctccgcttggattattggcgtctaccatcttgcagaagtgacaccctctaaacaaaaaaccagccattagaccgctagcccgatgaacttcgacccctatacattctctaatttctaacgtagacgttatgttttgcccttttgcattaggtgggagtaacgtttctattcctgggaatttaacgtaatcgcttacggttggctgatacccatcggttttcgattgttttaaagtggcaacgaccgctgcggcatccgttagccactgattgtcatccgtccaaggcttgataacccatggtgttgtagtgctttccataaaaaccccggcaatgcgggaacctttgcctaatttcgtaaaaataagatttccatctcctataaacttagctttacattctatagtcagaaccttaccaccaaaatcaactttctctccattataaaaatgataatcaacatcgataagaaggccatcaaccgcagcagatgctgcatcctgcaatgttggataatctgataattttactgaatacttaaattttttatcagcttctattgaatattgatctggatcgtacttcaatacgttagcaatatagtcaacctgagaaccattggcatcatagatagccatgctatgaccctgaacggtgacaattttcaccagttggccgttgtatacgattttaccggctgcgttgataattagcggctgagcaatctggacgtgagagccatcctcattttcaatgtatacgggtatctgattggcaggattaacaggatcggtatcaatctgaccaatgtaaattttcccattcgcaacagctttaaacgaacgggattcagtgaagacgggacgagggttagaaacaactacgtttgcagtgatatctgtcatttaatgtgctccagatgaaagtaatcgtcgcagcgtggctacggcaatgcgtcattaagaccacggtggtcttattgtggatacaaccagtagatcatatgatgctgatccacttacaaaagtgaggcatcagaaatgggaagagatgacccgcaatttaacctcaggctaccctacgagctgaaagaaaaggttaagcagagggcaaaggcaaacggaaggtcactaaatgcagagctagtgcagatagtggctgattcacttgaaaagcctacgcctgtaatcggatacagggatgatgctgaacgcgaagcagacatcgtatccagagaaattcaagaattagtattcgaaaagttgaaagatttctatcgaaaaaaatagcccggcgaaccgggctttactcattttttgcaagctatatacatgcttcttgatatggtgtttgttgcaaatgcgttgccagtacttccgtcaatgtttgcaatagctccctgatcactaccagtgctaatcaggtcatagccttttgaaccacaaagatctccggccttggcctgacacatagcccatgaaccacctactccagagcattctatggtatatgcctctcttccatctggagcatacgtttttgttgctgtagcgcacccagcgagaaatacacaaaaacagccaaccatcacaccttttttcattatcatcacccaattaagtaagggattcagataatatatagatcaaagaatgatctctattggttcctacgaggatttatgaacagagacttattgaactttgcattccttatcttcggcatcgtagttggtagactgctattcgcttaatgcatctgatttagcaccttgagcaacagagttaacagcccgctcaacttcggctaacgctttctcgaatgcggtagaaccacgtggagtattagccaggcgaagcattgcattacgtgctggttcactctcatacattcttgccagcaaaccatacccgccaccaacacctaccagcgcaggggtagttaccgttccaatacctaggatgaacggtatagtttgctgacctgtaggcgttgttactcctgcctgaccagcacgcttggttgactcaagatagttcttcagtcctttcagatacgcagcatctcgtcctttaaaagcgattcccgtctgggtagacattaaattaacctggcgcaggaactgatccggagaaccgcctgatttctccatagcctttccgatgatgccgttacgcatctgagcgcgtcccacctgaccgactgaccggtacagattctgaacttctgatttattcttgctgaacaacatgttgttgacaacttcaggagttagatcccctttcatcagaacgttcttcaagcgggtattctggagcttactagcctcatctgcgtataccgcattggcctgcttgtatctgcgcagagtgtcgtttccaaggttctggccaatggagttatcaatgtctcctgtcattgccctgtatacacgctgcactgccgcctcagctggcggtggcatttgtgtcctttctcctctgacatccatcctaaactgcgttctcagtctgcttaactgttccaggttaacatcacctttagccaattcattcctgtatgcctgaagtttgctaattgtatccgtgtcggcaacttgtcctaatttttgcagttttccaatctcatcatctatctgctgaattgctcgcgttggctgaatgttgactcctgtcattgcgctctgaacttgctcaagacggttccctgctgctttccgaattcctgatgtttttgccttcaggctgccaataacaattgacggatcatactcaccaaaccgtgatgcaaattcatctaccaactggctgcgcgcttcttgctgattagctcgcatagtgcttgttccagcaaatgggatgttttcagcggtggtctgtgccatgcgcccgacgcgggaatttggctgcaaaacgtcagttgtatgcaaaggaacatcagcagcattagcgaactgaatagcctgctgcgcttctggtgcgatcgtcccgcgaatcccacgataagcagcaccagcggcacggcctaactgatttattgccccgcctaatgcaacaccagttcctaagtctgttgccagtgctcctggattatcacgctcactgtttgcagccaatgaaccaacagcgttctccgccaacaagcgtgatgcaccctgagcaactcgaccggcaatagatgatgcctgcgctgcaattctctcggccccaacaggagtcaaatatggcagtgcttcagagaagattttgccttctgtcgtctgtggagtaagcgcaccttgttgcaagccaaagtcctgctcaagtccttgtgtcgtgacgcgaggcgatggctgataagttccgtcaccaatgccaagcttctgaccagcccatgccccggcgctggcgactgcatcagccattgatgccgggatatttgccagattaacgccagcctgaagcaatccacgccccgtctccgcagcagcattgctaaggtcagacatgaagccaccttgttgctgtggctgcgccggtccatgtggttgttttgctggttgttgagccgttggaggtggataagcagcatagaaagcctgtttagcctgttcggcatcgtttccggcttgcggtgctactacttcattgaagtattgctcctgcgcctgtgctttctgctctggtgctaatgcctggtacttttgagaggcaataacgtctttccatgccttagccattaatcaccccatagtgaagaaaagttgctgttggatgcaggctgtgattcctgtacaggttgagattgctgatactgcgatttaccaacattaacgttgtactgcttgttataattgttggtgtattcctgaatctcacgaatcgactgctgcatagcctccgggcttgagtagtcaacctgcggcataccctgaaaatacatctttgcttctgcaatggtgttgataccgctagcacccatatctcttgctgctgccacgccctgattctgcattcttccctgaatacgttgtgcggagttatataactgtcgttgttctttgcctgtgagtcggctgcgaacatctgcaccaattgccggatttcctgctccgccagtcattccagtcatgaaatcgagagcagaagcatctgcgtttgcgattgcatcgatatctttcttcatcgcgtagttctgtgcgcttgccgcagacgttggaggtgctgcaatagcacttgccgggacacgaaccatatttccgttatcgtcagtaccttcgtaaaatgcactagcgccagatccatgcagcttgccattgacattaacagtacgcccgtctgctaattgcacaacattttccccacctgcatccggcctgccacgaacacgaagataatttttttgttgttctggcgacaaactattgaaatactgatattcacggactgatgccggaaccgccccgcccgcagaacgtagcgagttttgggtactaatatcctgcccccttcgagcggtagcggcactaatatcctgccctcttgcggttaactggtttctttctccttcaagttggcgaccaaccatcttatcctgaacagcaaacgccttttctgtcccaagcgcaccgagagacatcgtagtcaacatgtgtgatagctgttctggattctgtactccagtctggatcatccagtctggattagcgccaacacggtttaacctgtccttgttatcagtaatgaatttactgtaggcttccggcccctgagaaagagcgacgttagccttcatggctaaatcgcccatatcgttacgctgctgctcattaagaccggaaaacgcctgttgtgcctgtgcaacaaacgccgggttttcctgcgcgaacttgatgagtcctgaattgtcgccagtagcccatgcgttggcatgaacctgattgaatgcgtttagcgctttctgttgctgttcctggttataaatatcagcaactccagccagaccacgcagccctgttaaagccacattattagcgcctgaacgggccaactcattgttttcgcgaatcagtccaagcgttgcgttaatgtcgcttgcctttggcgcgttctcattttgcgcaccaatgccagccagaaaaccaccagaattaataccctgttgccacgtagccattgattaccccttaaaacaacgagccaagcagaccaagaccgccgccgatcgcagccccccacggagttgatgaaccaattaatttcgcaagtccagccccagcaatagcaccagacgcacctccgccaatagcagattgcattgctgatggtctgttggcatttgccgctgcaagagccgcgctttgctgtgaaatctggctcatattgttggcatatgtctgtccggcgtttgcctgcccctgaagcgcaccaagaccaatatttgcaaggttctgatagttattcatctgacctgacagccattgctgaccaagtgttggggcgattgctgcaagctggttactggtcgctgtagaaccaaggccacctgttgcttctgccgctgccagattctgatagcgagcctgccccacaaagtcctggtattgttgggagttatagtaattattaagcgcctgcccctgaccttcgagagacgataaaccttcaagactgccgatatacttatctgccagaggagtaaacggcttcaggttgttcatgatggtgttgaactgctggttttgcaggtctgcggcatacttttgcgcttctgctgcatactttgcgcttttatctgcgccaccttttccgcctttttcaggataataaggttcctcaccgcgcagttttctgcccagcgtaaatgcatataacatgtttatctcccgtgattcaggaagtcgattagttcttcgcgtgtggcgctgtaaaacgtcacgtcatccacgcctttgaagtatttcttgatggttcctacacgcttaagaccaatcattgcgcagtacatctgaccgtggcgaaatttgcgtgcagcaaatgatgtaacgcactgaacggtggtattggtaagaatatatcgccagaacgtcagcccgatttccttactgaatccgcgaatctcaggcaggtacatggcgtggcagtcaaaggtcagcggctgaatctcgttgtaatacacgatgccaccgaactgaccatgtacgttcacttcgaaatagcggcactcaggtttgtagtcgtatccgtcaccgttgttactcccggcgatgatgtcgggatgattgccgaccgtttctatcaggtcgatgttgcgtgttggaatgaatgtaatcatcagttgattaatccatgagttcgtattgcatcttcgagagctttgatacgctgtcgcgcctgctgcaatccggtagccagagctgatacctcagactgcgtatatgtggcactgaccgtgtatgcctggttagcgttgaatgcaccgagaagcgcagcgcctgttgctgctgtccatccggtctgtcgagcaccgataactttagtaccgccaactgaataggacgttgtcacgttgagaggtgacgccagcgattgtgttgcggtagctgttttcgatacgtaatcaacctgcaatgcagaaatatttccttcagccgtcgtcactctaccatcaagagcactgacatcagcctgcaaggtgactatttctccttcagccgtggttagtctgacatccagcgccgcaattgcattggtatttgcagtaatacggatttcatggtcgtctacgtcgatgcgtaactgctgaattttcgcttcgtggtctgcaagctcaacatcctgctcatcgttctttacctgcgcgtcataggcaccttgccctgcttcgtttgcctttcccgcaatagcgccaacgtcagccccctgcgcgattacgtagagcagataagactggctgaagacgttgcgggggaggattgaggcatcaagacgagtggcctgaataatgacaggcttattaagtgacgggtctgccatatgttactccagacgaatttgacacccggatagtgttactggtgatttggtgattacccgcagtttgaatccgattaatcgacgaatgcgcccaacacgtttccagataacacgcttgtcgtacacaaacggctcattttgttcaatcatctgttcgcgaccgtaattgattccgtccgtggttgcagacagaaacaggcggtcagcatattgagcaacaccagtggatgattcaacttcgaggtcgaagcatctggcattgtccgctttgaagaggggggtaaacaacaggtgttcttgctgtagtccgtattggctgctgatgtcgaattgcaattgtcctgtcaacgcttctgatttatcgccgcacgttatctggttgccttcatacatgaagtcgacagcacgatatacatcatcgtaaagccctgttttcagcacacaccattgcggtccgttctgacttgacgatgcgtcgtaaaccagaacatgacgagggagatgaataatcagaagctcatgagaatcgaagcgcaaagtctccattacaccagtcgccagttcttcagctgtgtatgagcggataatcttctcaatactggccgtcgcaattggtgaagcctgccctgacccgatgatgtagacggaaggtgcgccagtagccgggtgactgatgaatgcatatgaatcagcgaatggcgttttacagtatgttccggcaatccccttctgtaccattaacgatggctgcgcgacatacaacgcagcgccaacggtggttgcgcctgtcagggagaaatactctatcgtcgacgagccaaagcagacgatgaaatctcgccatgaacctatgccaattatcccgtcaggctgcgattctgcgcgatattctgcactgtagcggtcaggatgcgattcatcttcaaggtcagtgataaaccatgaatctgtaccgtcttttgaccatgcataacgcccacgtaagcgagtaatgtcacggactgagcctaactcatactgcgtgaatccgctgtctgcaggccagtttgagacggttttaaccgcgccatcatagcgatactcgatgagctgaccattaacgcctaccgcctgtgatgtgcgaccatgtgccattgatacgcgaccgcttccggcaacatcaccgactacggcttcacctttgtagagcttgccgccacaaacacgatatacagcgttctgagcggtgttatactcaactccgcgcgatactccatttacatcgttgcgcttcgctatgcccgggaatgagcgtaaataacccgatgagttgagtacttctttcggtgtggccaacatattgattggtaggtaatcaatgtagtcggcattcttgaagtctttacccattcccttcatcatggggagttgttgaatcggcattctgctctccggggaaataatgccattcgttcagattggcgaaactattaccgctgcctgttggcatgcgtgacgggtaaggagctcttttggctctggcgatggcggtctgcttatagagaagctccttcccatatttagcggttgcgataattttggcggtagcctcaagcgcataatccggagcaattctgcaagccagattgtggaatactgcgctgattgcgcttgagcgaagaccgtggtcgtcaccttcggatggcgggttatcatcatctgagaatacatacccggtaacaatgcctttcccgtcctgataccactcagccatcatcgcttcaaggtcatctacggcatcctgcatagactgtggctcaacatcagtgagagttgcatctgatgctacaccaagcttacgcagcgccgccctgaccagatcgcctttagtctttatctgcatcgctttccgccttaggctttggtcctggctttttgcgttctttggttgccggttctttcggtcgcaggcttagcagacgattcaacacatcatctgccgtgtggccgtcccattccttgccaaactcaatttccgtgcctttaggcagatgttcaatttcactctctgggaggtggtatgttaccgcgccttctggggtgtcgatgccagctaacacccatccatcccattgctcgccgtcatgatgctgaaagctccaccatgcgctttcgcggaaggcattcattagtgttgaaaacaggcgcactcgatgtgcatatagttcgttaaaggtgtggtatccatcagatacttcacccatgtctttcttgaccacgcctgaatcaccgattggctcgtcattagtctccggaacctcatttggatgcctaacccaaccatcggcaaggtgatcttctacgtcgccgtcatcgacaactttaacctgaacgtccttgccccataccttcgttccacgaccctgcttatatagcattacacccatgtgtcacctcaaataagaaaggggccgaagcccctgttagttacgcagtctgaccaggcaggccaacaccgattgcttccggtcgtgtcgcgtttacgccgtaccacagcgcaatacggcacaggccggacagggtggaaatatcaccctgcgtagcgaagataccgttaaggccgacatccgggatgctgaatgaggtagttttcatacctgcaaacaattcgtggttagcaggaatcggctgagacacaatacggatggcgtcatcagcccagaacacgttggtacgggcatccttaacgttcaggatgttcaccgccattgcatcagccagtgaggtgttaacgttagcgtaggcgcgttgctcaggagaaagagaaacatcatccagtgctacaggcttcggcgtgatttcaacgtgagtaccatcaacaacgcgaactacggagaaagtcgcgtcctgcgccagtacgttcttagccatctgaccaaggaacttcacgccagtaaacgaaattttgtcgccgcgtttcaggccggtagttgcagacagggtgacggtagcaaaacggttatcaacgttaactttgttgccatcgttatccagttgccatgcgacaggcttgaaggactgcgcaccggatacagtgatgccagttgcagtagatttggtcagcacaggaagtttcggagagcgcaggacatcatcgaagccagcaacctgacgctggatagtgccatcgcggtacgcttcttcaggaatgcgcccgaagatatcgcgcttagtcaggtcataacccgcctttttgtagtcctgtgggttgaagaagtacgatgtccccatgtcgcggttaagttcgcgggagaacatcagttcttctgcatcggccacaaagttccatgcgtctgcggtgttagtgccgatagcgtccggcgaagtgataaccaatgaccccatctcggcggccatgtttgcgactttcagctcaacgttgttagccagtttgcgggctgcggactggattcggtgacgatacgctgtctcatcacgcaaatcatcggcgcgtaactggaagaagtcgttatctggctctcccatgtttaccgcgacgttaagctccagtaaccctgtcgctttatcagttaaatcccaaccctcctgagtgggggactcctgctctacaggcatccagatggtattgctggagcgctgcatggaagcagcaggcggggtgtatttcttggctttctgcgccattggagtgattgcggagatggtttcaataatctcatccaccgccagtgtaacaatttgaccttcgttcaaagccattatcggattcctttaagttttgcctttagcttgcggtaggtttccacatctcccttgctcgcagctgcatccatctgtttacgaatggcatctttatttgctgcgctgacatcaccggtaatcggctggtcagcagggggagcggaagagatttgtttaccgcgaggcttgagagttaagcgttcggatagtcgagtgagttcaatcagcgcggactgcccatccatcgccagtaactggcgggctttctccgggtttgcacccaggtgatacatgagcgcggcggacttctccgggaacaggcgcataatgtcggccccaaccgcaggcggaaccagttgcataaatgcgtcttctttctcctgatagtcagggatattgagcttttccgccgcgtcatagtgtttgcgggcagcttcgacgtattgcgctgatttctgggtaaactcctgagtcttgcggccctgttctgctacggcattgctgcgggcgtcctgcgctttcattagccattcggtattagcagcattgaaagcggcaagcgcacggctgttgtcatagtcatatttggccaggccttcttctgacagataggcattaatatccggctgaggtggaaggtcagggtttacccgtaaactctccggcaattctccgcatttaactgcttccatctgctgctcaagctcgcgctgtcgtttgcgctcgatgcggcggcgggcgaattctgcgttctttgccgggtcttgttttggtgctgtctcatcgtacttcaggacaatctcaaagccctcttcctgacctgcattgtcgttggcattatcgacaactaagctatcagcagatgccgctgcatgatcgccggacagggttaagtcttcagttgcctgaatttcggtggttggttccatgattaactctctcttattgaggtgtctcggctacactgccggaaggttgattttgtctctgcgattgcaggatgttggcaatgtccattcgctgcttgtgcgtctgttcattgcctttaaggagtaactcagcatttgcgcgagcgtcttcgctgcggtcctgctggaatgaagcaacggttttaaggaactctctaaactcagattgtttactgaggtccatgttgttgaagatttctgcgattctggcagcgttaagctggttctgcgcttcgactttagctgcatcgatttgcagggacagcgtctggttctgagctttagccagttcagcctgcccctgcaggagtacgccctgagcctgaaccattgccgggtcttgttgaccttgtttggcttgttgcgcctctactaaccattgctgctcttcaggcgtttctggcttcttaacgcccatctgaataagctgcttattggcataatcgcgcatcatctcaacgcctttgccatcaagcagtgtgaagtactgaagcaacagcagttgatattctggcgttccctgcggcgtcttgccgagcaactcaagaatttctgagcggttttgctgcttcatggactggaatgatggtccaacatccgtgtagcactcatagcgccccctgatatcgttcagtacctgccgttcaccagtggcaaggtcaacaacctcagccattagctgaacctctttctcactaccatcctcaagggtgattgtcacgttgcgaggaacatcgtagatgtcattaactatcgactggtaaatctcaccgtcacggcgcatagcggtagccagattatcctgaaacacgtatgtctcaaggtcagcgcgcatgtttagctggttaacagtgtcgtaggctacctgtccaccgtttaccgcctctgcatcaacacctagcgtcgcgacctctttcactgccgcggtggctgcttccagcatgtaggcgttggcttgcgggacctccgggttttcgtaatatgccagcggctgagttggcatttctccgttgttctcatccgtgcgattgagcaggtagtatgggtaatcgtcgttaccgtcatacatatgctcaaagcctgcaatctgctcaggccagaagaaaggcttcttctttggggtgcgggccacgatgtcggcgttgaacgacataatcatgttgcgcagacgctgaccgtcttttgtcaggcggacgaccccctcatacacttctttatcttcaacgaagccccactctccgaataccggaacaatggggatatgttctccagcaatgagttgcttatctttcagtactgcggtgcaggtgataatagatttgtatacccggcgacgcttaatctggcgctctgcaattttgataaatccactatcagccaggtcgtcgatgacgtctttaatatcgcgcttaaagtagcttaccggctcacccgtaaccgggtcttggtagataaacgccgtctctttcttctcgaccacttcgtaaaactcagcgatctgaattgtgtcctgcgtcagccatggaaatacccaatcgttggggttctggaatgatggaatattatcagcatcgaggtcgtatttttctgcgaaatcatcccagccattctggctcattgagtggataactgtgcagtgacgggcgtcagacttgtccatcagtttgctgttgctgtcccagataacatgggagcaggcactatggataggctctcgacgaataacctgattgttactcgtcgggctttggtcttcgtaatcagtgaccagacgccacgcacccacgcctgcttcaatctgctcacgaacggctatgttgacagcaattttcgccgtattgtgccgcatgtcggtgcgatacatgcccatcagcacatcagcggcgtcaggacttgctccatcctttggacgatacagaacatcaatagggttctgacgcatctcagaaacgagcttgcgcaccactggacgtacaacatcgaactgcccgcgatactgcagggttgtgtattgtgatagccagtcatcccactgagatacgcgggagaagaagagatcattcttggcctcccttctggcttcatcgctggctgtccagtccgcatcaaagcgcgacaggatactctccagcctgttttcattgtcggccattatcgtcctctgcgtactggtctaatcggtgcggggattttcttttctttcggctttctgatatcgcgcatcatcctggcgaagcggcgcatcatgtagccgtagcgagtagcatcgagcacatcatcgttggtcttgacaatcttgccgttctcatcgcgatgatataggcggaactcttcaaaaaatggttcgcatgtattgaatgctttgaatcttccttcaagcatcaggtcacgaagttcactaatgcctgactctactgagttaccgccatccgggaacgttgcgtgatcgggaagcatagagaacccggcatccgcatattgggttttaagttgctcaccaccgcccttttcgtgttggtgaccgtcatgaggccacgcgacaggtattttgttagcccacgacttaacagcaccccatgcctgaacggcagtgttctctgatttcttccatacacgcgccagatagaaaacatctgcgtctttgtcccaccaaagctgaatgtgagcttgcgggtggttccagccgaagtcctgagcgtcgataacatagaagtgatcgggacactcaaacggctggcacttaatcgtctcttccggtatctggaatattcgaccgctacccatcgtaggaataccacgagcacgtgcctctctctcatgctcaggataggatgctatgatttgctctttctgctcgtcggtgtagtgctcagcatcatagatggtcatgttgaccactttctgcgacttactgggattcttcaggaacttggtaacaacgtcagacatccccatcagcggggtaaacgtcagaattgagaattgcccgtatttgtttgtacgggtaagaccttcgccatagatgctatatggcggctcttcgtcaaaccagacgccgtgaattgtgtcgccctgccagcgggcgcggccctgtgagtaaggcttaaagtagcatattgagatgccatcttcgacgccttctggcgtgtggtgcttaacaagaaggtgatcaacaagattagggaagaacggagacttcttccagctaatgatgtcctctttcgggattgacccatagccaggttcatcattctcttcgatacgcccgcacaggatgcgttgagtcgttttggttacagtctcgtttgtttcaccgccaacccagaagacaactggctcatagaaacgcttacctttccactctccgccatatttaccatcagccggataacctttcgttcccgggtatcgcccggtaaggtgaaacgcgacttcagcagcgccagtaaatgacttaccaagctggttaccagccataaaacatcgctctggataatcatgacctgcgtcgatgaactcacgctgtttgctgtatggcgtaaactcatatagcaagtgtgtatttcggtagttctcttcttcttcgagtagctcgagcaattcgatttgctcttcgtcgctcaggttatcaagaatcgcgtccagttccacggttgaatagctccttgatacgagagcggcgcttatcgcgatctcccttatcaggtgtcacgtcttcaaattgcgactgctctttgaggcccaaatcgcgggcgatgatgttagcgttgagaagatcagcggctgcgccggagaatttctggtcgtagatgatttgctctgctcgcgtaacgacctcagataagtcttctctcaccctgtattgtcgccatgtctcaagcgtcacatcgaggaatagcgttagcccagtgatggtcatcgccctcatcttggcaataggctcttgtgtaacttctccttgatatgagaaagccttcatctcccatagtgggttagcctccacccactcgaagtattcacaacaagcagcccacagcgcctcaggcgactcgaatttcgggttacgcccatggctactgcgggcctcccagaatcggttgccctttggtgctgccataagttaacttcctgatgttgtttcgatagtcacgttagccgaaccatcaaaggacgctgaacctgtgaccgctccggttagtgtgatagtgcgggcagtagataacttatccgccgtctctgcattagctactgaaccgcttgcagaagtgtagttagcttcaaatgctgtcttgctcatatagagcagctcgccgtactggctccggaacagatatccgccaacctccggcttgaatacggctactgtttgcgctgacatgtactggtcagcatacgggccgtcgaattctgcgtttgcacttccgtcattagcgtatttgatagctttaatcggaagcgcagacacatatacaccgtcagcatctttgtatagaggccatgatggcgtgaagtttgggtttgccattacttggctccttctttttctggttcatgaaagaacggcaggaagtgactgaacattctgtcaagcatgtagcagtaggtttcgtttgcgtcgccaggataagtggttacaccaacatctcggcagacataaaatgcaacgtgagcgcattcatgaaccaatgtggccgcctcaccattgaatacaccaagcaggtaaagattctcgcctgtttcggtattgcaatatgactgtgttgcccccgccagcatctcattcccgccgctaccaactccaagatgaatgcaagcctgatcccactcttcctttgaacgacacaggtagacattggcgctatggaacaatggcacgaagaaccggggaagtttaggccacttcgtctttgccattcgttatgctccggcagtgaacaggtctaacgcttcttttgcctcacgaatagccttttctgcgcgagctaatgccgttccttcaccctgcgccaaaaccagttggtctttgaacagttcgaagttcagcttacttccagcaacgaatgcgatcgctttctctgctgctgcggtatcgctttgaactaaacggaggatatcgaggttcatctgctgtaattctgtcaatgctgtaatctctgccattgtgttggctccggttgttgggataagccattgtctagaccactcattgaatggcctctgcaataaccgatgtctttccatcagtccgccaccacaaagaatcttttttgccataaggctggaggttcatctttcagtggctgccagtgttatttccccacttactggcttgggttgtttcgcggtactgccgtaatgtacaaactggattaaccagcagaatcacaccattccgggcaaatacatttgcacttcatttgctgctctctcacgtgcaacatgaagcaatcttgttcgcccaccaacgccccacttagccatttgacttgcacactggcttatcgctttggtttcagtgctgatgatgtggtcaattttgttcaggcgagacatggcaccaacgccgagacggacaatcgttttaaaaacttcataaacctcgatttcaaattccggcttaatccatgctgcatatctgattgccagtagttcaacgccccacacaccaggttcggtaccacctttaatgattttaagtggttgaatttgtttcaaagtgcttttttgcactttggcctctagtgcttttatgaagcgttttatctgcgcgctacacaaaaacttgcttgggcgctgttgctctgtagcctctccatttgcaactgctgctgcatggagatcgtttaagttgtagcgtccgtcctcatcaacacgaacggacacaccattgaccataactgttgggtacttcatcagtgatcacctttaagtgatgaaccttgtcacacaggattccggcccacagaaaggtaccgatcaccaaaccggcatcctcaagggtcatcctgaaaggttctgtgttcagaagtcgcgcgtgtgaagcgcatttactgcggatacaaaaaagcccggcattacgaggcattttcatgaaagtcacttgtcaaatttctatgtgatggaaattatttcaggcattgcgtcctgatgtactcctgaagcgttctcagtgctgcttggtcgctgatgattccgtcccggataccgagaacgtttcgtccagcaactggagagagttcgacggtggcatcattgcccatgccggaggcgctggaggtttcggctgaggatgacacagggcattttcctttgacgagcacccgaccaccattatcaagcttgcgccgaagagcatcattctcagctttcgcatcagcaagctcctttgtgtatctggcgtcaagttctgctacatcacgctggcgcgtttgcatatcggtaattgtcgcgttcgccagcgccagcttttgagtaacagtgtcgcgctggactttgtaggtgatggcgttatcacgataatgattaacagcccatgacaggcagacgatgatgcagataaccagagcggagataatcgaggttaatctgctcattgcttaccccacaaacagacatcacgctcaacctcacgacgagtcatcaggcctttccattgcttaccgccagcgtatgtccagcgacgtagctgatcacatgcacctttgatatcaccctgattgattttgcgaagaagcgtcgatgttctgaaattgcctgcgcccacattgtaaacgaacgagtaaagagcgccgcgcgttgtttccggtatatctactttgatgtacgggttaatttgtctggcgacagtgataaggtctttattcaggagggctttgcattctgcttcggtatacgttttaccaggcatgatgtcttttccggtgtggccataacacacagtcaacacaccgactacgtccttatatggtttgtatctgacaccttccagaccatcgttaccaccggggccagtgattaacacagatgctatagcaatagccccgccacttatcgccgccattacgctatttcgtagtgccggtgacattgccattcaatctgtcctcacgctctttgcgtttgtagtaccagttgatgccaaatgtgccgacagtacaaagaataccaatgatgacagcccagtcattcagggagagaatgccacccatcgcagtcagtcctccgaagctgtaactgaaccattctctgattttgtccatacggtacatgctctaccccttcattgaggggatttgctctatttaattaggaataaggtcgattactgatagaacaaatccaggctactgtgtttagtaatcagatttgttcgtgaccgatatgcacgggcaaaacggcaggaggttgttagcgcaacctcttgcccccatcctcacgaagcccagccatagtgctgggttttcttttgtgtaaaacgccctacccagtcgccacgaatgagcaagggtatctggatatgttctggtgattggtgatagggcgctttcagaaatgtcgttcttaaaacgcaaaaagccccgcatcattgcagggccttttttttaaatccaccttaacaaagcacggatttctactgttagggttatgatattctacttttcgtcattttgcaagatacaatcgttatcggaataaaacttagctggtaactttcgataaaactacatttgcagcagactcctccatttcaaccttgctaattaatgactcatagaatggcttaatagccttatcccatacgcctggtgaaattgcagcggtgaactgacatatcgcacgaaagcatgaggccgcaggtatgcgctcatacccacgccctgagcactgcttgcaggatgaataaactggagcgccctgtagttctgatttcttcctgtccagcgctacgccacgcccacggcatttaacgcaagatgtagatacaacacctgcaccattgcatttagtgcatagtgattccgttacctccacagccgtctttgcaggagttttctctccacacccaggatgtttaacgatccgcttcttattccttaatactccgcgccccttgcagcacgaacacatgacattactagctgccgaccggcagtaatcctgatacgcgaaagttgcgagcgtttgcactactttccctttaacattggtatcaagtttgcgtaaggcagccaccttgtcgcaatgcttcatcccatgctgtaccagtaactgaattgccttacgcttatcgttgtcgctcaggttcatcttgccgctgaaagcactgaacccgagcggagcgcgactttgcgccataccaaatgctgccatcacatcggtattagtcagtgagtctgatgccgttgctctcggtgaatctgatagttgaggagacttcggagagtggaatttcacagtgttttccaaattcatgcagcatcgcctcccgatgtcttgttcaatccaagccggttcaccagttcacgctctcgctcatgcagataatccatcgccttctggtgttgctccgtcatctctctgacgctgcgcaattcagcttcgtcacgttcacactgctgtttcgcctggttaatgctggttacggtcatagatacctctcccgccctgatgaatcattaaaacgccgttaacgatggcgtgatacctggcttctttgtcgtacagataacgcctgactgtgtttcgatggcacgacaatcgcctggctacttctgtctggtttccgtatgtctcaatgagcatgtctggaatggttttgatagtgtgtgtcatgcggcctcccggataacctgctcatggctcagatattgaccccagcaactgaccaacaatctcgctttcacaacggctttctcttcgttgcgccacctgcagaaccagttaacagcgccttccatttcttgcctgaccttgccggcattgtcgaaatgcagcggatagacaacatcatcgaaaattgccgcagtggtcattgggtattggattttgctcatgctgcctctcttctgctgtcacgcaggtctttaagtttctgctgatactccgccttaatcgctttgcattcttcgatagtccagcgatggcggttatggtttgattcgatttcgtctactgcttcctgcccgatgcgattaatcagttcgacgcgatacggaacgagatttccgcttttgtgctggttgcacaccacgcattgcttgtgaatattgcgttcatcaaatcggagttgaggtgccgcagcagttgtccggtaatgcccggcatcccactgagcagacgtgagcgttccgcacgagacacatggtaagtcgcggtctctttctctgatgagggcgtttacggcttgttgggcttgtttaatccagtaactgcggggctttaaggcgagttttcgaatcttcagtttatctttctgtttctgttcctctcgtcgtcgtttcttctctgctgctttttccgctttttcgcgttctttgcttcgtcgctcgagtgctatcttggttccacactctggagagcaccaccactgattagcgaatgcagggtgaaaccattccctacattcttcgtttttgcatcgtcttcgcgctggtttagccatcgtcttcttcctcgtacattgagctattcggatcgctcatcagttctgcgcagcagtgctcacatacgtgaacttccagcacatgcagcttctgaccgcagttagcgcacgttaaagcccgctcgacgctttctttctggtattgaagggattgggatggactaagcattattggcgtcctgcatcatgagaaagacaatcatggcggcgcggagaggtctggtatcaaatattgggcttacgccttttgcatccacacaccattcagttaactggtctaagatagaaatcctgtgtttctcaataatcggccatgaggcactcggatcattgcagtaatcaggtaaatggtttaatggctcaaaagttgtatcagcgtttccgtaataccatttgttggtgttattccctgacgtttccggcttacatgcccaaaggcctttaaaaattatgtctcctaccattcggttaatttcaaaatcacttaactgtgaataatccattgtcatttcctcgcacgttctctaagccaccggatatcccacaggtgagccgtgtagttgaatgtttttacgtcagattcttttgggattggcttgcgtttatttctggagcgtttcgttggaaggtatttgcagttttcgcagattatgtcggtgatacttcgtcgctgtcgtgccatacgtcccccttcgtctctggcagcgggaaattacctactggcgaccgctcacatctgatacaccattggtgccaataaggttgatttggccggaatcgataatcgtctttgctttctccgcagcggtagcagtgtttcatgcggcgtctccaaacctcgctttccattccagtgctaaccgggcttcgtctgaccacttaacgccgcgctctgtaccgaatgcctgtataagctctaatagctccgcaaattcgcttacacgcatcctgctggttgactggcctattaccacaaagccattcccggcaaggttaggaacaacgtcctgctgctttaatgccgcggtaaacacacacttccagctttcagcgtcaagccatcgtccatgccagttaacctgacgtgagacatcacaaaggcaagcccaaagcttccgattttggtctaagctgcggttgcgttcctgaatggttactacgattggtttggttgggtctggaaggatttgctgtactgcgtgaatggcattttgctgatgtgctggagatcgaatttcaaaggttagttttttcatgtcttccctctcccccaaataaaaaggcctgcgattaccagcaggcctgttattagctcagtgatgtagatggtcattgcttcatctccctttccatttcatcaatgtcaacgtcatcaggaagatgggagcaatacgctgctataccatgatgatttatctcataccctttgaacgttgccatctggtgcgtaatctcaacttcgtttaggaatccgtcatcgcataactgcctggctattttcgatttggtctggattattggtagtgcctgttctttcaaagcgtatgatatttgtgcatcccatgccttttcgagaatggctaattgttttttattcatacgtcagccccttgtgcatatcgtctgccacgcgcagcaggtgcatttgatgctgtgcaaatctgtctggcttcatcctggtcacatgcaacaaagtgtccgttgcagaaccgctggtaaaccgtaccaagcgagccaaaacggtttttcgtcacaatgatttcagcaaatggtgcggcgctactgttctcgtcgtataccgcttcacggtaaagcatgatgattgagtctgcatcctgttcaatgcttcctgaatcacgcaaatctgcgtttgtcgggcgcttgtttggccgcttctcaacatcgcgtgaaagctggcttagggagataactggagttttcaggtctttcgccatcgctttcaggctaccggagatatgtgctatggcgaggtcattacgttccgcttttggtttctcaattagcccgagatagtcagccataatcagtgacagattaggatgctcctgcttgtggcgttcggaaatggacctgatttcttcgacagacaaacgcgatgcgtcaactacccacacatccagatctgccagcaacttcatcccgcttgcaactctcgcccatccttcatcgtccattcgtgacgggttacgcagcacactgaccgacatcattcctgcgccggcaatccctctctcaacaacctgaatggcgctcatttccatcgagaaaatcaacacaccgcgccggacgccagaaccaggaataacacgacttgccacgccttcggctatcttcagcgccagttcggttttacccatacctggacgagcagcaataatcacaaggtcttctgcgttcattcctccggtgatagcgtcaagctcttcgattccggtcttcagggtatccgactcttctccgttcctcagacgcctgtcaagcgtgtcagtgtaatcattgataatttcccccagtcgcacaggtttaacctcgttgcgtggcttcctgatggctgaaagacgcttaacaagatcgtccatcgctctacctgaagcatccagcgtgccgttactgattggctctcgcatctcatccagtagctgtaaaacctgacgccgttgataactgtctacaaccattccggcataacctttcaggtttgcagcgctgggacatgaccgcgcagtcatcatcaccgccgttgcgtattcatccccgcactcctcggccaccatcagtccatcaatcaggttcctgtttctggcctgctttcgaataacttcaaaagctttccggtaaagcggaattgagaatgcttcaggctccagcgttgccagaacgtcactcgcggttggtgttaatccaccaatcagcaagccaccgataacgctcgcttcgatatcctgtctcatgcaatccccctgtctgcaaacttcccttcccgaactcccgttaacgaatcttccctcagcaggtaatcaaaatcagccgtccagcctgtgtcgttgtctccgaagtaaaacggcttggcctgatgcacaaacgccctgacatacgccctgaaaccgtccacgtttggcgttttcagttgcgggatgattttcttcaggcggcgtttccgtttctcgttgaccgaaacagcatgtggaagtctgtcaccgacttcggtgttgtaggcgttcaggaaggattcgtagtcgattcgttctgccttgcgacgttcaggtttaacctgcccatcgccgcccccgttagggggtaagggggtatttgtatttattgtcttttgtatattgtcttttgtgtttagctgacttggcttatacccattagccgacttggctaatgttttattagctgttttagctaatgttaagctgtcctggctaatccactgcgaaaccaccttgttcactccgattttcacgccatcagcaatgaggaatttacgctcaataagctggcgcttagcagcgcaaacatgagtgtgatgaatacctgtcatggctgctatctgcgtgtttgtgagtcgatccatcggcttattgaatccgtatgtcttgcgcatgatagcgagcatcaccttcaactgccggacggttaaatcagccatcagcagactgtcggtaatctcgttagcaacgcgcatgaaaccatcttcggtatctgccacgcgatgctccacgacctccagatgaggcctgtaatcagctaacttaacgacgcccatgtttcactcctgctttggctagtctgtaaacaccaacaaggcgctctgcgaacgccctgttatttgctgcggctactactaatccctcaggtgaatcagggtgtcgaatctcttctttttcctggtatttcttacgacgttttgtcataatgactcctgtggattgatccagtctttctacatcaggcctcgaagaattcgccgttcttcggggctttttcttttgtcaggtaggtagcaagtcgcctggtgagctctgccatttcctcgtcttcgattccatactccagaaccgcaagcatcatgctgacctgagagaagaaaccgttcttccatcggcttacctggtattcaggaacacccatagctttagcgaatgtcttctggcccatcatggctaacttgttgagtaaggtggactcgatgcgagccgccttcttgcttttagttgcaactacgttcattcaaaatattccttagaaattagatagagttggattcgcaaatacacgcaaatccgtttaatagatttaccgcgttgtcggcggttcagattggtaaagagcgttgatacttaacttgctgccagtaagtcggctaaatcaggacgaagttctctggctttaattcttcctcctgtagcttttacgattgctgccacatacttagcgtcaatgccgccaccatgtaaccaacgccatacagttggctgcttaactccacacaaagaggcgagtttttgctggcttcctgcaatggcaacagctttttgtattgctttgttagtcattgcttattccctttcgtataacacacaacaaataatagcaatgagtattaatcaaagcaatagcaaaacgtgttttgaccattaatacgcaagcgtataaattgaatattatgaaaaaagaaactctctctgaccgtctcaacaaggcaatggaactggctggtatgtctcaaggtgctctcgctaaagcgtcaggcgttgctcagccaacgatctggcgtttgacaagtggaaacgctcgtgggtcaacaaagattgttgaaatagcaaacgcgttaggtgttaattcggaatggttgtctaccggaattggtcctatgaaaaaagatggaactactccgataaacgcatctccatcttcaaacacatttaaaatcgatatcctagatcttgaagttagcgcgggtcctggcgttatcaatcgagaattcgtggaaatactccgctcggttgagtattcgcaggacgatgccagacacatgttcgatggtagaaaggctgaaaatatccgcatcataaatgtgcgcggagatagcatgtcaggaactattgaaccaggagatctgttgtttgtagacgtaagcatcaaaaacttcgatggggatgggatatacgccttcctctatgacgatactgcacatgttaagcggctccagaagatgaaagataaactattggtcatatctgataataagagttattcagcttgggacccaattgaaagagatgaaatgaatagggtttttgtctttggaaaggtaattggaagcatgccgcagacctataggaagcacggttagccagccaatggcctgatgagatattcgggtgatgatggaccgaagggatgtttgggtgatagtgattgtgtgaaacaggtcgcagaaatgcggcctttttacaaaaaaatgcaagcactcaagatagaatatatgcttgcttattaatttatatacttgatattatgcaagcacatttcacaacaaagagtgcttgcataatgtctgataaagaaagcaaagaaccaacgggaaagtccaaaggtggtgtggcaagggctaatgctctttctgcagaagaaaggtcggctattgcaagaaaagccgcagcagctaggtggggtggcgatggtgaggtggaaattgccaaaagatctggcgacattgtcattggagacttaaagatacaatgtgccgtgcttgaggatgggacgagggttctgtcagagagagctatcactaaagccttcggcgggaagcgtggaggctcccactggaagagaatgaaagagaatccagatggcgcctatcttcctgttttcttgtcagctaaaaacattaagccattcattaataatgaattatcagaaggcctatcccggcgccgtcttttcaaaataaataaaggagcggcgccagcttacggcattgaagcatctttgctcccaaagatatgcaatgtttatttgaagatgagagatcagggtgatgcccttcagtcatctcagatacctatttctgttcaggcagacattatcatgcgcggtcttgcagaggttggtattgtagcgctggtagacgaagctactgggcatatcgatgaaaagagacaagatgaatatcgaattctctttcaagagttcatcaaagagcaggtcagagaatatgagaaggaatttccgaagcagttcacggatggcctttatcgactttacggacttacgcagaaaaaagcaggtcggcaccctcagtttttcggtaagtttacgaggaagtatatctacgaaccattagcatcaagtaaaggcgccatccttgagatgctagatgaaaaaaaccctgtcgtttatgcgaatggcggtagaagatataagatgtttcagttcctaaccgatagcatcggagttccgatgtttagggcgcacctttggcaggtagttggcatcctttcaagctcaagaaataaagctgagtttgacagagcattcaaaagagcctttccatcgcccgggactcaatttgagttgctagatgaagatgagtaagcgatcacgcccggccaccgcgccgggttttctttgccctactctttcggcagcgtcagaacatcaatagccagttctacagccaagtccacatcctcttcctgccacagtacctgaatcatttctatcaaagcttcacgcgaaggttcgcgctgctctaccagtacctgcatcagcgctgtaccgagaacctcaaccacctgcgggtgaagctccgcaaagaactcttcctcacttttcacactgattcctcgctcgttttttgttcagaacagtatggcatagaggatttataaaaataaattcattttgctatcaacaacataataccaaaaaccactaattaatagcaaaacgtattgatatggataatactcaatgctattgtttagccatcagcaggacgctggtagccaaacggaaaggcaacgctctttaacttcgatgatgcgctgacaaagcgcgaacaaataccaaacgagatgggtttgggttgcaggtagaagccaacctcttcggcggaggcgctcggcaatgagtacgcggtcagggttagtcgcctggctatctgcaacaccaaagctatttcacatgaggattaaatcatgacggttatcacctacgggaagtcaacgtttgcaggcaatgctaaaactcgccgtcatgagcggcgcagaaagctcgcaatggagcgcgacaccatctgcaatatcattgattcaatttttggctgcgatgctcctgatgcttctcatgaggttaaagccaaaagaattgaccgcgttaccaaagccatttcgcttgccggaacgcgtcagaaggaagttgaaggaggatctgtacttcttccagacgtagcactttacgcggcagggtatcgtaagagcaaacaaataacagcgaggtaaaacatttgtcggttaagtcgttatttttttggcctgctcgtcctgtgcaataagttcattcataagaatgtctgactccccggcaaacctaatgtagcactcatttctatagctttccgggataacaaaacggtcggtatcaggatatccagtagcagaaggtatccgaataagaagccctttttcgagcaatgaaattgcttcagggcttcccttttctgtctttagctggttattagcggctacagcgaatgccaaatacgctctttctccaagagttaacgaatcaaacaaatcccgaacgactttttcttctctggccttacgctgctgagcagttgatgcctcaattctttcattcacgacatgataaacagaattaacaacaccattcagcacatagctaacacagaacagcaggatgtaatacatccagtactgaggaaggatttctggattatgcaggtttacccattctttcacgcttaccggcataacgacaatcagtaaaatcaggatgatgatcatatgaatcaactgtttaagtgtcattccttgcaggaaaaaacgcattagctcctgccaccatgagttgttcatcggcgattctcttttgctctctgtaggggtgaatagagtttatccgatttctcgctgtaggggtacacgagaaccaccgagcctgacgtggttaaaagacaggcacaatctttactaccgcaatccactatttgagatgagatatggaagaagaatttgaagagttcgaagagcatcctcaggatgtgatggaacaataccaggactacccatatgactacgactattgatacaaatcaatggtgtagtcgttttgtgaaatgcaaaggctgcaagcttgatgctgaatgtatggtgaagcctgaggaaatggctctggtgagagaagatggaaagattgtcgataaatgggcaatcagaaccacggcaatgattgccagagagctggaaaaactaaagtctacatagttggccttcttttatctcacttcaaatatctaatcaggtcgcaatgcggccttttttattgccaaaatttaaggaataacaacatgaattcagcagatttatcgaagattcttgaagaacacaaagtgtggattacctcaatgcgtgagagcggatctagagccaacctgtacggtgccgacctgtacggtgccaacctgcgcggtgccgacctgcgcggtgccgacctgtgcggtgccgacctg

SEQ ID NO: 6 - DNA, 41284 bp, unidentified
  source 1..41284: mol_type = unassigned DNA
  misc_feature 1..41284: note = the genomic sequence of a bacteriophage
ctgcgcgatgccgacctgcctgatctcactttcgtaattctgggtgagaaatacttcataagtataacgaacggtgaatatgtacgagcaggatgccagaaccacacagttgaggaatggagaaaatatagtaagcaggaaattgctgagatggatggtcgtaaagctcttaaattttatccacgtcttctggacattatcgatttctatattggtaaaggtgaacgcccggattggttaacaagtaaagaatatgcagatgaagtaactgagtaagcgtatttttggcagcgagacacagaggtgaatatgaaaaagtttaaaggtacgccaggtccttggagcggaaaggatgtacgcatttgcaggcaagatagagctgggttgcagcttggttttatcatgacccatgacgaaaatcgcgtagctgaatgtgaggccaatgcacacttgatagcagcatctcctgatttgctcgaggctcttcaattggctgaaaaagcgatggcagaaggacgcaatgtgacttatccggagtggtacggggtaatcaataaagctcgcgcagccatcagcaaggctcttggggaggagtgatggaaataaataaagagcaggcatcagaaattataaaacttatcgaacaagcattacttgatgggtttgatgatgaaattctggtttcgctacacgaaagtcttaccaaatttgtcagcgaataagcacctaatgaccattttaatagtggtcattgtgagcaatatcgctcgtaaccaaacgaggacgacgactcgttctggttaatcgaaaaatcatcccttgatgttatttgccgctctatatgggcggcattctttttacctgggggaaatatgaaattacgtgtctggcatatcccgcaagttcctatgaagccattcattgtagaagtagcaagtgttgaagagggtgtgcgagtgatggatgcactggctgattatgacgcatttcagtatgacaacaacatcaaacctgattactgcaacgctaacggccttgagatgtgggatgagagccttactgaccaggatttggaagaaatggagcttacggatcgctgggtggattggtatagcgaatgccagtgttacgacgacccgcgtgaatatatcgaaagcctgaaagaagaaacaacaacagccgcctgagtgcggctgttttatcgcatatccacagcgcttcatatcgaggcgttttagctatgccaataaatgaaaatggagagtcccacgatgacatttgctatcgcgggcggtgccgtcatgggtatcgcccaacttaatgaatcacttttagagcgtatcaccagaaaattacgggccggatggaaacgtctcggtgaaattcttaatcagccaggagtaccacgccatgaccattacgcctgttaacggaacaattcttgttcagcaaggaaacagggagttcaacaagctatatgagaaagtatttccggatacaaaacagggaatgtctgatgcgtatacatgggctgcaggaatagctcttggttgggataagtggcaggacgaagaatgggaggcgcgtcatgttgcatgattttgatgataacgagtttattgccctcattcctcctgaaattgaggaagaagtggagcagcaaattaacttagccgcagaacggcagaatccgattattagctgggatgaatttgcggggtattactcatgaatctggatctgttagatgaaccgttcgctgctgaagatattgagtggcgaatacagcaaagcgggaaaacacgcgatgggaagttatgggctatggtgctggcttatgtcacgaacagggcaatcatgaaacgcctggacgatgtttgcggaaaggccggatggcgcaatgaatatcgcgatattccaaacaatggcggcgttgaatgcggaatatcaatcaagattgattccgaatgggtaactaaatgggatgccgctgaaaacacgcaggtagaagccgtcaaaggcggtcgttcaggagcaatgaagcgcgcagccgttcagtggggaataggacggtatctgtataatcttgaggaaggatttgcgcagatatccagagataagaaacaaggatggcacagggcaaaactgaaggatggaacaggattttactggctccctccatcgctgccggactgggccatgccagcatcatgcaatcaaccatcaccagaaaataccaaccagaaatctccatcggttgactgcgaacaaatcctgaaagacttcagcgattatgcagcaacagaaactgacaagaaaaagctaattgagagatatcagcatgactggcaattattggctggtcacgatgatgcgcagacaaaatgcgttcaggtaatgaatatcagaataaatgagcttaaacaggtggcttaatgagaagattaaacataactccagctgagatggagtcagtttgcggtcgcatggtagcttgccgtgcagcagaacatctgggcctaaacataaatcagttttattacatagcaaaaaaactgtcattaaaaacggcattcgttaagccaagatggagcgacgacgaagacaaaagaatgcagacgcttatctcatcaggctatacacaaagaaatgtagcaaaaattctcgggcgaagtgaagagtcggtaaaaagcaggctatcacgtttacgaaagaaataaccctatacgtaccacattattcggataacctaccctggagtaaattatgcctgcacctctatatggtgcggatgacccgcgcaactgctccggtagctccaagtcggaggtgctggaaaatatcaaaaacaatctcgacgcgtttcttgctctgccaccggaaacaaaagcagaacggaagtaccgacgcgatatacaactcgcagaaaaacaggaaaaagaccgaataaacgaaacagcaatccgaccattccgaaaagccacttacaccaaattcattgaaatagacccgcgccttaaaaattaccgttcgcgttacggcgctatcagcaataactgagggattcatcatgagaggtttgtcctacgaccaaggaatccttccatcggaaatgattattcgacaccgcttcaagcccatcaacgatattccacgcgaagaaatgctggcgagaaagagttttccatcagtgaatcaaaacaaatatctgaatgcgatgtggcggagtgggaagaaatgaaacaaatgacactaattgagatggatggatttctgaaaggtaaatgcatcccacgagatttaaaggttaacgaaacaaacgctgaatatctggtgcgtaaatttgctgaagcggaggccaagatttccgcgctggccgaagaccaccagagagcgattgagtcaattaagcaggctgattcggctgttaagttggcacacgagaagttttcggcgctggcttcggagaatgcggcactgaaaaaatcagaggtcgaattcaacgaatattgtcgtcgcgagtgcgaggacgttggagatacgtgggtggacgatttcactgataccccagccaccgacgctttcctggatgaagtgcgtgcgcaggcgtttaatgacctttgctcggcgttcgttaaggacgctacggttgtcgggctggacgatggcgacatcgttacggtgaaagaagcgacggacgccctgctgcattgtgcagaccaacttcgcaagggagtgcattcatgaccaacctactaccatgtccattctgtggcggcgcggcgcacgttgccagcgaagcagatcaccctgaatatggctctggcggtcgattctatttcgttcgatgcggtacgtgtcgcgctcaatctggtagcaaatatgcggcgcctggaaatgactgcgcgattttttattcagaggttagagcagagtggaatcagcgagcaaaggaggcaaccagtgagcaagattgactatcaggcactgcgtgaaaaggcagagaaagcaacgtgtggtgtgtggtcgctcgaatatggagaggagagatttgatgctggtgatgcgctaattcatcgtgaagttgttggatatcttcccatttgcagaattgaaggagcgcatcctgaaagcggtttcgatgaagatttccaaatggaacagcaggccaatgctgaattcatcgctgcagccaatccggctactgtgctggcactgctggatgaacgggaaagaaaccagcaatacatcaaacgccgcgaccaggagaacgaggatattgcgcttacggtaggtaagctgcgctttgagcttgaagcagcaaaaaagcgcatagcggaactggaagccgaacccgtaagccaaacttacaagttgaacgagctatcgggcagctatccggcaactccggatggttggataagctgtagtgagcgaatgccaaacgaagaagatgttttggtttattgttcagacacaaaagagcagatggtagggtttcacaaaggtaaagggttatttcaattcttttacatgaacggtgttgagggggtatgtgagccgtcacactggatgccgctaccggagccaccgcaggaggtgaagtgatggaccccttcgcgaaatatacgattattgactggatagccttccttcaggttttgctcatctggttttatatggcttacaggagtggacagtggattgtcagtgtagcctgtagcaagggatggcgttggtggaaccgaaagaataaaaaagcactggcattggattcgttttacgaagcattcaatcttaacagccttcagcctggttctgtcgttgtagtcaccactcaaagcggcatgacgatacaaattcacaagccaaaggaggaaggtcgtggctaacctgcaacttgccgtcaaaggtgaatacttcgatgccatgattcgcggagagaaaacggaagagtatcgcctgtgtaatgactactggaataagcgaattatgttccgggagtatgaccgcctgattatcacaaagggatatccgaagcgcgacgattccagccgcagaattgacgtcccgtatgacggatatgaaatcaagacaatcacacatccgcacttcggcgataaaccggtaaaggtgttcgcgataaagatgaatatcggcaatgaataacaatcctcgcactcgcggggatttcttttatctgagctcgctacggcgagttttgttttatggagtgaatgatgattcttgtgatcagtgccacctatctttgtcgccgcggggatattgatggcgcggtttacgcaggtatagcaatttttggatttattgagcttcttgtagagattgctcttctcgcttcagtattaggaaagtaactatggaatcacacagcctcacactcgatgaggcctgtgcatttctcaagatatccagacctaccgctacaaactggattcgcacaggccgccttcaggcaacacgcaaagacccttccaaacctaaatccccttacctcaccacacgacaagcctgcgttgcggcacttcaatctccgctgcatactgtccaggtgagcgcgggtgatgacataacagaggaactgaaatgtcactattccgcagaggtgaaacctggtacgccagtttcacattgccgaacggcaaaagatttaagcagtctcttgggacaaaggacaaaaggcaggccacagagcttcatgacaaactgaaggcagaagcatggagggtaaataaattaggagagacgcctgacatgacttttgaggaggcctgtgtcaggtggttagaggagaaggcgcataagaagtcgctggatgatgacaagagtcggataggattctggctccagcattttgcagggatgcagttgaaggatattaccgagacgaagatttactccgccatccagaagatgactaatcggcggcatgaggaaaactggaagttaatggatgaagcttgcaggaagaatgggaagcagcctccagtattcaagcctaagccggcagcagtagccacaaaagcaactcacctttcattcattaaggcactcctccgggctgctgaacgcgaatggaagatgctggataaggctccgatcatcaaagttcctcagccgaaaaataagcgtatccgctggcttgagcctcacgaggcaaaaaggttgattgatgaatgcccggaaccgctaaagtcagtcgtagagtttgcgctttctactggcttaaggcggtctaacattatcaatatggattggcagcagatagacatgcagcgaaaggtggcatggatacacccggaacaaagtaagtccaatcaggccattggcgtggcgctgaatgatactgcttgccgggtgctgaaaaagcaaataggcaatcatcacaaatgggtgttcgtctacaaggaaagcagcaccaagccagacggaactaaatcacctgtagtgaggaagatgcgctatgacgctaatactgcatggaggtcagcattaaaacgagcaggcattgaagacttccgttttcatgacctgaggcacacgtgggcaagctggttagttcaggctggcgttccgatttcggtattgcaggaaatgggtggctgggagtctatcgaaatggttcgcagatatgctcatctggcaccaaatcacctgactgaacatgctcgacaaattgactcgatttttggtacttctgtcccaaatatgtcccacagtaaaaataaggaaggcacgaataatacgtaagtatttgatttaactggtgccgataataggagtcgaacctacgaccttcgcattacgaattataagaactaccttttaagtcaacaacataccgcgtcatacctgcgctcacacgtcccatcttcgaaaaacatgcaaagccttgcaagccgatgcaaagctttgtgtgtcccgtttttgtcccaaaccacttagcaatcagcaataaaaattgatcggtaacaacgatcaattaacgagcaaacaataactttaaactatcaaagtttacattattgatcgtttatatcgatcaaagtaatttgtagtgctacactccagacctttccgaatccgctgattttcataatgttgaagttattcgctaagtacacatcgatcggtgttcttaacacgcttattcattggggcgtatttgctttttgtgtgtatgggatgcatacgcatcaggcgctggcgaacttttccggttttgttatcgccgtatcgttcagcttctatgccaatgcgcgtttcacctttaatgccaccaccaccacgcttcgctacatgatgtatgtgggattcatgggaacactgagcgctgttgttggctggatggctgaccaatgttccttgccaccattgattacccttatcactttctcggcaattagcctggtatgcggctttatctattccagattcattgttttcagggatataagatgaaaatctctcttgtcgttccagtttttaacgaagaagacacgataccgattttctataaaacggtacgtgagtttaatgagctaaaagaatatgaaattgagatcgtttttattaatgatggtagtaaagatgcgactgaatcaataattaacaaaatagccgcatctgatccgctcgttattccgctttcgtttacgcgaaacttcggtaaagaacctgctcttttcgcgggtctcgaccatgcaaccggagatgcggtcattcctattgatgtcgatttacaggatccgatagaagttatccctcatctcattgagaagtggcaggctggcgcggatatggtgctggctaagcgctcagaccgctcaactgatgggaggttgaagcgtaagacagctgagtggttttataagctgcacaataaaatcagcaatccaaaaatcgaagaaaatgttggcgactttcggttaatgagccgtgcggttgtcgagaacatcaaacaaatgccagaacgcaacttgtttatgaagggtgtgctcagttgggttggcggaaaaacggatgttgttaaatatgcccgtgccgaacgcgtggccggtgattcgaaattcaacggctggaaattatggaacctggcgctggagggaataacttctttctcaacatttccgctccgcatatggacttacattggattgtttattgcaggtatgtcattcctttacggtgcatggatgattattgataaattaatatttggaaataatgttcctggctacccgtctcttcttgtttctgttcttttcctgggtggcgttcaattgataggaataggtattcttggagaatatattggtagaatttacatagaaaccaaacagcggcctaaatacatattaaagcgtaagggttttaaaagtgaaatttaatagtaatgacaggatatttatatcaatctttcttggattggcgattatatatacatttcctttattgacacatcaatcatttttcgttgatgacttgggtaggtctttatatggcgggttgggttggtcaggcaatggtcgcccactttccgactttattttctatatcattaattttggaaccccaattatagatgcttctccgctacctttaatgctagggatagttattttagcattggcactatcctgcatcagggaaaagctgtttggagatgactacatcacagcatctctttgttttatgatgattttggcaaacccattctttattgaaaatctatcatatagatatgattcattaacaatgtgcatgagtgtggcaatatctattatctcatcgtatgtcgcttatcaatacaagcctataaatatcataatatcatccattttaaccattgcattccttagtctttatcaggctgcgctgaatacttacgcaatattcttgttggcctttataatttcagatgtggttaagaaaaactcaatttcaaatatcacaaaaaatacagcatcttctgtcgctggtttaatagtaggatattttgcctattcttactttattgcaaaaagacttgtaacaggttcttacaatatcgaacatagtaagattatagagataaactcaagtttatttgaagggataatttctaacgtcttatcattttatagaatgtttagcacgatcttgaatggcgataattacttaatctactactcgctattctttgcgctaatcatttctttgatagtcatagttttaaaagtaatcaaaagagatgaaaataagaaaacaaagttcttgctagtagttttaattttattggcatcaatgtttttcatcattggaccaatgatttttctaaaatcaccaatatacgcaccgagggtattgattggtatgggtggctttatgtttttttgttgcctatgcgtattctatgcttttgaagataagcagttaatatcaagaatatatttttcttttattcttttaatatcaacaatattttcttatggtgcttacaatgccataaatgcacagtttcagcttgaggaaagcattgtaaatagaatatctcaagacatagatcatcttggatttggaagagacaagaaaaatataaaattcattggcacagaaccgtatgcatcaataaatgaaaacatagtaataaagcatcctttaatgagagagttaataccacgcattattaacaataattggatgtggtcagaggtgttaatgcaaagaaatgtgttctccagaaattacagactatatgacaaagaggtgaaacttgaaaatgggtggaaaaaatctggtaataacgtatacgatattggtgttgtaggggaaaccatagttgttaggtttaattagctatagaacatttaccataaaataaaaatgggtgtttacacccatttttattacatatctaaagtgttgctaaggttaatctaactaattctccattgggttttttcactaaagcctttaaagaagtagaattattttcccaatatggcaaaaaacatgaggaatcctttataaaatcatctgacgcgatgtcagggacaaatggtatctctgcccccctgcaatctttgtggttaacttttaatgatacagcgtcaggtgtgttacctgaaatagcagtaagttgagtccacgctgagccagaaccgggccccccgttaatgtgggagtacaatgctccgctatctaaggtctttgataacttatgaatccgcagtttaatcgctgcgctatcatagccgaaactattagcgcggatattacctaacccttcttctgccaaattagcaacattaattctagaggggtctaccatcccggtgataccgcttacggtagagttaggggcgtctatggttagaccctgcccatcggttgagcggatcccaattaaacgtaaaccgttcacacggcaagccccagatatataaatctgattagcctggaaatccttagtattggtatcaattatggctatattggtaaatactgattcatgggtgagtaggtacgcgccagagccagcgcaatcttctacggtaatattagacacatacatgcccttaccatccataccaaaacctacacctaacgccccgcgaaccagaagattatcaatcaggtgatttaggggtaactgatgcagtgggtattgggttatagggtagtccccaggcctgtccaactccggattcatgtcagtgtcagcacctaaatcgaatccgtcccatacggggtaaataacgaccgagtcgcggaattgcagattatagttgcgagaggttgtcgagcccacagtaccttgccaagttttaacaccactctccccagcgcgatatgaagtaaacccaataactccaccatcacgttcaaagccaccattattacgtaaaaattgggcgctacttactgatccatagctggttcgtccgccaatgacatagttacccttaccccaatcgccgctaaggttttcgaaggttataatgccatctttacctccgcttggattattggcgtctaccatcttgcagaagtgacaccctctaaacaaaaaaccagccattagaccgctagcccgatgaacttcgacccctatacattctctaatttctaacgtagacgttatgttttgcccttttgcattaggtgggagtaacgtttctattcctgggaatttaacgtaatcgcttacggttggctgatacccatcggttttcgattgttttaaagtggcaacgaccgctgcggcatccgttagccactgattgtcatccgtccaaggcttgataacccatggtgttgtagtgctttccataaaaaccccggcaatgcgggaacctttgcctaatttcgtaaaaataagatttccatctcctataaacttagctttacattctatagtcagaaccttaccaccaaaatcaactttctctccattataaaaatgataatcaacatcgataagaaggccatcaaccgcagcagatgctgcatcctgcaatgttggataatctgataattttactgaatacttaaattttttatcagcttctattgaatattgatctggatcgtacttcaatacgttagcaatatagtcaacctgagaaccattggcatcatagatagccatgctatgaccctgaacggtgacaattttcaccagttggccgttgtatacgattttaccggctgcgttgataattagcggctgagcaatctggacgtgagagccatcctcattttcaatgtatacgggtatctgattggcaggattaacaggatcggtatcaatctgaccaatgtaaattttcccattcgcaacagctttaaacgaacgggattcagtgaagacgggacgagggttagaaacaactacgtttgcagtgatatctgtcatttaatgtgctccagatgaaagtaatcgtcgcagcgtggctacggcaatgcgtcattaagaccacggtggtcttattgtggatacaaccagtagatcatatgatgctgatccacttacaaaagtgaggcatcagaaatgggaagagatgacccgcaatttaacctcaggctaccctacgagctgaaagaaaaggttaagcagagggcaaaggcaaacggaaggtcactaaatgcagagctagtgcagatagtggctgattcacttgaaaagcctacgcctgtaatcggatacagggatgatgctgaacgcgaagcagacatcgtatccagagaaattcaagaattagtattcgaaaagttgaaagatttctatcgaaaaaaatagcccggcgaaccgggctttactcattttttgcaagctatatacatgcttcttgatatggtgtttgttgcaaatgcgttgccagtacttccgtcaatgtttgcaatagctccctgatcactaccagtgctaatcaggtcatagccttttgaaccacaaagatctccggccttggcctgacacatagcccatgaaccacctactccagagcattctatggtatatgcctctcttccatctggagcatacgtttttgttgctgtagcgcacccagcgagaaatacacaaaaacagccaaccatcacaccttttttcattatcatcacccaattaagtaagggattcagataatatatagatcaaagaatgatctctattggttcctacgaggatttatgaacagagacttattgaactttgcattccttatcttcggcatcgtagttggtagactgctattcgcttaatgcatctgatttagcaccttgagcaacagagttaacagcccgctcaacttcggctaacgctttctcgaatgcggtagaaccacgtggagtattagccaggcgaagcattgcattacgtgctggttcactctcatacattcttgccagcaaaccatacccgccaccaacacctaccagcgcaggggtagttaccgttccaatacctaggatgaacggtatagtttgctgacctgtaggcgttgttactcctgcctgaccagcacgcttggttgactcaagatagttcttcagtcctttcagatacgcagcatctcgtcctttaaaagcgattcccgtctgggtagacattaaattaacctggcgcaggaactgatccggagaaccgcctgatttctccatagcctttccgatgatgccgttacgcatctgagcgcgtcccacctgaccgactgaccggtacagattctgaacttctgatttattcttgctgaacaacatgttgttgacaacttcaggagttagatcccctttcatcagaacgttcttcaagcgggtattctggagcttactagcctcatctgcgtataccgcattggcctgcttgtatctgcgcagagtgtcgtttccaaggttctggccaatggagttatcaatgtctcctgtcattgccctgtatacacgctgcactgccgcctcagctggcggtggcatttgtgtcctttctcctctgacatccatcctaaactgcgttctcagtctgcttaactgttccaggttaacatcacctttagccaattcattcctgtatgcctgaagtttgctaattgtatccgtgtcggcaacttgtcctaatttttgcagttttccaatctcatcatctatctgctgaattgctcgcgttggctgaatgttgactcctgtcattgcgctctgaacttgctcaagacggttccctgctgctttccgaattcctgatgtttttgccttcaggctgccaataacaattgacggatcatactcaccaaaccgtgatgcaaattcatctaccaactggctgcgcgcttcttgctgattagctcgcatagtgcttgttccagcaaatgggatgttttcagcggtggtctgtgccatgcgcccgacgcgggaatttggctgcaaaacgtcagttgtatgcaaaggaacatcagcagcattagcgaactgaatagcctgctgcgcttctggtgcgatcgtcccgcgaatcccacgataagcagcaccagcggcacggcctaactgatttattgccccgcctaatgcaacaccagttcctaagtctgttgccagtgctcctggattatcacgctcactgtttgcagccaatgaaccaacagcgttctccgccaacaagcgtgatgcaccctgagcaactcgaccggcaatagatgatgcctgcgctgcaattctctcggccccaacaggagtcaaatatggcagtgcttcagagaagattttgccttctgtcgtctgtggagtaagcgcaccttgttgcaagccaaagtcctgctcaagtccttgtgtcgtgacgcgaggcgatggctgataagttccgtcaccaatgccaagcttctgaccagcccatgccccggcgctggcgactgcatcagccattgatgccgggatatttgccagattaacgccagcctgaagcaatccacgccccgtctccgcagcagcattgctaaggtcagacatgaagccaccttgttgctgtggctgcgccggtccatgtggttgttttgctggttgttgagccgttggaggtggataagcagcatagaaagcctgtttagcctgttcggcatcgtttccggcttgcggtgctactacttcattgaagtattgctcctgcgcctgtgctttctgctctggtgctaatgcctggtacttttgagaggcaataacgtctttccatgccttagccattaatcaccccatagtgaagaaaagttgctgttggatgcaggctgtgattcctgtacaggttgagattgctgatactgcgatttaccaacattaacgttgtactgcttgttataattgttggtgtattcctgaatctcacgaatcgactgctgcatagcctccgggcttgagtagtcaacctgcggcataccctgaaaatacatctttgcttctgcaatggtgttgataccgctagcacccatatctcttgctgctgccacgccctgattctgcattcttccctgaatacgttgtgcggagttatataactgtcgttgttctttgcctgtgagtcggctgcgaacatctgcaccaattgccggatttcctgctccgccagtcattccagtcatgaaatcgagagcagaagcatctgcgtttgcgattgcatcgatatctttcttcatcgcgtagttctgtgcgcttgccgcagacgttggaggtgctgcaatagcacttgccgggacacgaaccatatttccgttatcgtcagtaccttcgtaaaatgcactagcgccagatccatgcagcttgccattgacattaacagtacgcccgtctgctaattgcacaacattttccccacctgcatccggcctgccacgaacacgaagataatttttttgttgttctggcgacaaactattgaaatactgatattcacggactgatgccggaaccgccccgcccgcagaacgtagcgagttttgggtactaatatcctgcccccttcgagcggtagcggcactaatatcctgccctcttgcggttaactggtttctttctccttcaagttggcgaccaaccatcttatcctgaacagcaaacgccttttctgtcccaagcgcaccgagagacatcgtagtcaacatgtgtgatagctgttctggattctgtactccagtctggatcatccagtctggattagcgccaacacggtttaacctgtccttgttatcagtaatgaatttactgtaggcttccggcccctgagaaagagcgacgttagccttcatggctaaatcgcccatatcgttacgctgctgctcattaagaccggaaaacgcctgttgtgcctgtgcaacaaacgccgggttttcctgcgcgaacttgatgagtcctgaattgtcgccagtagcccatgcgttggcatgaacctgattgaatgcgtttagcgctttctgttgctgttcctggttataaatatcagcaactccagccagaccacgcagccctgttaaagccacattattagcgcctgaacgggccaactcattgttttcgcgaatcagtccaagcgttgcgttaatgtcgcttgcctttggcgcgttctcattttgcgcaccaatgccagccagaaaaccaccagaattaataccctgttgccacgtagccattgattaccccttaaaacaacgagccaagcagaccaagaccgccgccgatcgcagccccccacggagttgatgaaccaattaatttcgcaagtccagccccagcaatagcaccagacgcacctccgccaatagcagattgcattgctgatggtctgttggcatttgccgctgcaagagccgcgctttgctgtgaaatctggctcatattgttggcatatgtctgtccggcgtttgcctgcccctgaagcgcaccaagaccaatatttgcaaggttctgatagttattcatctgacctgacagccattgctgaccaagtgttggggcgattgctgcaagctggttactggtcgctgtagaaccaaggccacctgttgcttctgccgctgccagattctgatagcgagcctgccccacaaagtcctggtattgttgggagttatagtaattattaagcgcctgcccctgaccttcgagagacgataaaccttcaagactgccgatatacttatctgccagaggagtaaacggcttcaggttgttcatgatggtgttgaactgctggttttgcaggtctgcggcatacttttgcgcttctgctgcatactttgcgcttttatctgcgccaccttttccgcctttttcaggataataaggttcctcaccgcgcagttttctgcccagcgtaaatgcatataacatgtttatctcccgtgattcaggaagtcgattagttcttcgcgtgtggcgctgtaaaacgtcacgtcatccacgcctttgaagtatttcttgatggttcctacacgcttaagaccaatcattgcgcagtacatctgaccgtggcgaaatttgcgtgcagcaaatgatgtaacgcactgaacggtggtattggtaagaatatatcgccagaacgtcagcccgatttccttactgaatccgcgaatctcaggcaggtacatggcgtggcagtcaaaggtcagcggctgaatctcgttgtaatacacgatgccaccgaactgaccatgtacgttcacttcgaaatagcggcactcaggtttgtagtcgtatccgtcaccgttgttactcccggcgatgatgtcgggatgattgccgaccgtttctatcaggtcgatgttgcgtgttggaatgaatgtaatcatcagttgattaatccatgagttcgtattgcatcttcgagagctttgatacgctgtcgcgcctgctgcaatccggtagccagagctgatacctcagactgcgtatatgtggcactgaccgtgtatgcctggttagcgttgaatgcaccgagaagcgcagcgcctgttgctgctgtccatccggtctgtcgagcaccgataactttagtaccgccaactgaataggacgttgtcacgttgagaggtgacgccagcgattgtgttgcggtagctgttttcgatacgtaatcaacctgcaatgcagaaatatttccttcagccgtcgtcactctaccatcaagagcactgacatcagcctgcaaggtgactatttctccttcagccgtggttagtctgacatccagcgccgcaattgcattggtatttgcagtaatacggatttcatggtcgtctacgtcgatgcgtaactgctgaattttcgcttcgtggtctgcaagctcaacatcctgctcatcgttctttacctgcgcgtcataggcaccttgccctgcttcgtttgcctttcccgcaatagcgccaacgtcagccccctgcgcgattacgtagagcagataagactggctgaagacgttgcgggggaggattgaggcatcaagacgagtggcctgaataatgacaggcttattaagtgacgggtctgccatatgttactccagacgaatttgacacccggatagtgttactggtgatttggtgattacccgcagtttgaatccgattaatcgacgaatgcgcccaacacgtttccagataacacgcttgtcgtacacaaacggctcattttgttcaatcatctgttcgcgaccgtaattgattccgtccgtggttgcagacagaaacaggcggtcagcatattgagcaacaccagtggatgattcaacttcgaggtcgaagcatctggcattgtccgctttgaagaggggggtaaacaacaggtgttcttgctgtagtccgtattggctgctgatgtcgaattgcaattgtcctgtcaacgcttctgatttatcgccgcacgttatctggttgccttcatacatgaagtcgacagcacgatatacatcatcgtaaagccctgttttcagcacacaccattgcggtccgttctgacttgacgatgcgtcgtaaaccagaacatgacgagggagatgaataatcagaagctcatgagaatcgaagcgcaaagtctccattacaccagtcgccagttcttcagctgtgtatgagcggataatcttctcaatactggccgtcgcaattggtgaagcctgccctgacccgatgatgtagacggaaggtgcgccagtagccgggtgactgatgaatgcatatgaatcagcgaatggcgttttacagtatgttccggcaatccccttctgtaccattaacgatggctgcgcgacatacaacgcagcgccaacggtggttgcgcctgtcagggagaaatactctatcgtcgacgagccaaagcagacgatgaaatctcgccatgaacctatgccaattatcccgtcaggctgcgattctgcgcgatattctgcactgtagcggtcaggatgcgattcatcttcaaggtcagtgataaaccatgaatctgtaccgtcttttgaccatgcataacgcccacgtaagcgagtaatgtcacggactgagcctaactcatactgcgtgaatccgctgtctgcaggccagtttgagacggttttaaccgcgccatcatagcgatactcgatgagctgaccattaacgcctaccgcctgtgatgtgcgaccatgtgccattgatacgcgaccgcttccggcaacatcaccgactacggcttcacctttgtagagcttgccgccacaaacacgatatacagcgttctgagcggtgttatactcaactccgcgcgatactccatttacatcgttgcgcttcgctatgcccgggaatgagcgtaaataacccgatgagttgagtacttctttcggtgtggccaacatattgattggtaggtaatcaatgtagtcggcattcttgaagtctttacccattcccttcatcatggggagttgttgaatcggcattctgctctccggggaaataatgccattcgttcagattggcgaaactattaccgctgcctgttggcatgcgtgacgggtaaggagctcttttggctctggcgatggcggtctgcttatagagaagctccttcccatatttagcggttgcgataattttggcggtagcctcaagcgcataatccggagcaattctgcaagccagattgtggaatactgcgctgattgcgcttgagcgaagaccgtggtcgtcaccttcggatggcgggttatcatcatctgagaatacatacccggtaacaatgcctttcccgtcctgataccactcagccatcatcgcttcaaggtcatctacggcatcctgcatagactgtggctcaacatcagtgagagttgcatctgatgctacaccaagcttacgcagcgccgccctgaccagatcgcctttagtctttatctgcatcgctttccgccttaggctttggtcctggctttttgcgttctttggttgccggttctttcggtcgcaggcttagcagacgattcaacacatcatctgccgtgtggccgtcccattccttgccaaactcaatttccgtgcctttaggcagatgttcaatttcactctctgggaggtggtatgttaccgcgccttctggggtgtcgatgccagctaacacccatccatcccattgctcgccgtcatgatgctgaaagctccaccatgcgctttcgcggaaggcattcattagtgttgaaaacaggcgcactcgatgtgcatatagttcgttaaaggtgtggtatccatcagatacttcacccatgtctttcttgaccacgcctgaatcaccgattggctcgtcattagtctccggaacctcatttggatgcctaacccaaccatcggcaaggtgatcttctacgtcgccgtcatcgacaactttaacctgaacgtccttgccccataccttcgttccacgaccctgcttatatagcattacacccatgtgtcacctcaaataagaaaggggccgaagcccctgttagttacgcagtctgaccaggcaggccaacaccgattgcttccggtcgtgtcgcgtttacgccgtaccacagcgcaatacggcacaggccggacagggtggaaatatcaccctgcgtagcgaagataccgttaaggccgacatccgggatgctgaatgaggtagttttcatacctgcaaacaattcgtggttagcaggaatcggctgagacacaatacggatggcgtcatcagcccagaacacgttggtacgggcatccttaacgttcaggatgttcaccgccattgcatcagccagtgaggtgttaacgttagcgtaggcgcgttgctcaggagaaagagaaacatcatccagtgctacaggcttcggcgtgatttcaacgtgagtaccatcaacaacgcgaactacggagaaagtcgcgtcctgcgccagtacgttcttagccatctgaccaaggaacttcacgccagtaaacgaaattttgtcgccgcgtttcaggccggtagttgcagacagggtgacggtagcaaaacggttatcaacgttaactttgttgccatcgttatccagttgccatgcgacaggcttgaaggactgcgcaccggatacagtgatgccagttgcagtagatttggtcagcacaggaagtttcggagagcgcaggacatcatcgaagccagcaacctgacgctggatagtgccatcgcggtacgcttcttcaggaatgcgcccgaagatatcgcgcttagtcaggtcataacccgcctttttgtagtcctgtgggttgaagaagtacgatgtccccatgtcgcggttaagttcgcgggagaacatcagttcttctgcatcggccacaaagttccatgcgtctgcggtgttagtgccgatagcgtccggcgaagtgataaccaatgaccccatctcggcggccatgtttgcgactttcagctcaacgttgttagccagtttgcgggctgcggactggattcggtgacgatacgctgtctcatcacgcaaatcatcggcgcgtaactggaagaagtcgttatctggctctcccatgtttaccgcgacgttaagctccagtaaccctgtcgctttatcagttaaatcccaaccctcctgagtgggggactcctgctctacaggcatccagatggtattgctggagcgctgcatggaagcagcaggcggggtgtatttcttggctttctgcgccattggagtgattgcggagatggtttcaataatctcatccaccgccagtgtaacaatttgaccttcgttcaaagccattatcggattcctttaagttttgcctttagcttgcggtaggtttccacatctcccttgctcgcagctgcatccatctgtttacgaatggcatctttatttgctgcgctgacatcaccggtaatcggctggtcagcagggggagcggaagagatttgtttaccgcgaggcttgagagttaagcgttcggatagtcgagtgagttcaatcagcgcggactgcccatccatcgccagtaactggcgggctttctccgggtttgcacccaggtgatacatgagcgcggcggacttctccgggaacaggcgcataatgtcggccccaaccgcaggcggaaccagttgcataaatgcgtcttctttctcctgatagtcagggatattgagcttttccgccgcgtcatagtgtttgcgggcagcttcgacgtattgcgctgatttctgggtaaactcctgagtcttgcggccctgttctgctacggcattgctgcgggcgtcctgcgctttcattagccattcggtattagcagcattgaaagcggcaagcgcacggctgttgtcatagtcatatttggccaggccttcttctgacagataggcattaatatccggctgaggtggaaggtcagggtttacccgtaaactctccggcaattctccgcatttaactgcttccatctgctgctcaagctcgcgctgtcgtttgcgctcgatgcggcggcgggcgaattctgcgttctttgccgggtcttgttttggtgctgtctcatcgtacttcaggacaatctcaaagccctcttcctgacctgcattgtcgttggcattatcgacaactaagctatcagcagatgccgctgcatgatcgccggacagggttaagtcttcagttgcctgaatttcggtggttggttccatgattaactctctcttattgaggtgtctcggctacactgccggaaggttgattttgtctctgcgattgcaggatgttggcaatgtccattcgctgcttgtgcgtctgttcattgcctttaaggagtaactcagcatttgcgcgagcgtcttcgctgcggtcctgctggaatgaagcaacggttttaaggaactctctaaactcagattgtttactgaggtccatgttgttgaagatttctgcgattctggcagcgttaagctggttctgcgcttcgactttagctgcatcgatttgcagggacagcgtctggttctgagctttagccagttcagcctgcccctgcaggagtacgccctgagcctgaaccattgccgggtcttgttgaccttgtttggcttgttgcgcctctactaaccattgctgctcttcaggcgtttctggcttcttaacgcccatctgaataagctgcttattggcataatcgcgcatcatctcaacgcctttgccatcaagcagtgtgaagtactgaagcaacagcagttgatattctggcgttccctgcggcgtcttgccgagcaactcaagaatttctgagcggttttgctgcttcatggactggaatgatggtccaacatccgtgtagcactcatagcgccccctgatatcgttcagtacctgccgttcaccagtggcaaggtcaacaacctcagccattagctgaacctctttctcactaccatcctcaagggtgattgtcacgttgcgaggaacatcgtagatgtcattaactatcgactggtaaatctcaccgtcacggcgcatagcggtagccagattatcctgaaacacgtatgtctcaaggtcagcgcgcatgtttagctggttaacagtgtcgtaggctacctgtccaccgtttaccgcctctgcatcaacacctagcgtcgcgacctctttcactgccgcggtggctgcttccagcatgtaggcgttggcttgcgggacctccgggttttcgtaatatgccagcggctgagttggcatttctccgttgttctcatccgtgcgattgagcaggtagtatgggtaatcgtcgttaccgtcatacatatgctcaaagcctgcaatctgctcaggccagaagaaaggcttcttctttggggtgcgggccacgatgtcggcgttgaacgacataatcatgttgcgcagacgctgaccgtcttttgtcaggcggacgaccccctcatacacttctttatcttcaacgaagccccactctccgaataccggaacaatggggatatgttctccagcaatgagttgcttatctttcagtactgcggtgcaggtgataatagatttgtatacccggcgacgcttaatctggcgctctgcaattttgataaatccactatcagccaggtcgtcgatgacgtctttaatatcgcgcttaaagtagcttaccggctcacccgtaaccgggtcttggtagataaacgccgtctctttcttctcgaccacttcgtaaaactcagcgatctgaattgtgtcctgcgtcagccatggaaatacccaatcgttggggttctggaatgatggaatattatcagcatcgaggtcgtatttttctgcgaaatcatcccagccattctggctcattgagtggataactgtgcagtgacgggcgtcagacttgtccatcagtttgctgttgctgtcccagataacatgggagcaggcactatggataggctctcgacgaataacctgattgttactcgtcgggctttggtcttcgtaatcagtgaccagacgccacgcacccacgcctgcttcaatctgctcacgaacggctatgttgacagcaattttcgccgtattgtgccgcatgtcggtgcgatacatgcccatcagcacatcagcggcgtcaggacttgctccatcctttggacgatacagaacatcaatagggttctgacgcatctcagaaacgagcttgcgcaccactggacgtacaacatcgaactgcccgcgatactgcagggttgtgtattgtgatagccagtcatcccactgagatacgcgggagaagaagagatcattcttggcctcccttctggcttcatcgctggctgtccagtccgcatcaaagcgcgacaggatactctccagcctgttttcattgtcggccattatcgtcctctgcgtactggtctaatcggtgcggggattttcttttctttcggctttctgatatcgcgcatcatcctggcgaagcggcgcatcatgtagccgtagcgagtagcatcgagcacatcatcgttggtcttgacaatcttgccgttctcatcgcgatgatataggcggaactcttcaaaaaatggttcgcatgtattgaatgctttgaatcttccttcaagcatcaggtcacgaagttcactaatgcctgactctactgagttaccgccatccgggaacgttgcgtgatcgggaagcatagagaacccggcatccgcatattgggttttaagttgctcaccaccgcccttttcgtgttggtgaccgtcatgaggccacgcgacaggtattttgttagcccacgacttaacagcaccccatgcctgaacggcagtgttctctgatttcttccatacacgcgccagatagaaaacatctgcgtctttgtcccaccaaagctgaatgtgagcttgcgggtggttccagccgaagtcctgagcgtcgataacatagaagtgatcgggacactcaaacggctggcacttaatcgtctcttccggtatctggaatattcgaccgctacccatcgtaggaataccacgagcacgtgcctctctctcatgctcaggataggatgctatgatttgctctttctgctcgtcggtgtagtgctcagcatcatagatggtcatgttgaccactttctgcgacttactgggattcttcaggaacttggtaacaacgtcagacatccccatcagcggggtaaacgtcagaattgagaattgcccgtatttgtttgtacgggtaagaccttcgccatagatgctatatggcggctcttcgtcaaaccagacgccgtgaattgtgtcgccctgccagcgggcgcggccctgtgagtaaggcttaaagtagcatattgagatgccatcttcgacgccttctggcgtgtggtgcttaacaagaaggtgatcaacaagattagggaagaacggagacttcttccagctaatgatgtcctctttcgggattgacccatagccaggttcatcattctcttcgatacgcccgcacaggatgcgttgagtcgttttggttacagtctcgtttgtttcaccgccaacccagaagacaactggctcatagaaacgcttacctttccactctccgccatatttaccatcagccggataacctttcgttcccgggtatcgcccggtaaggtgaaacgcgacttcagcagcgccagtaaatgacttaccaagctggttaccagccataaaacatcgctctggataatcatgacctgcgtcgatgaactcacgctgtttgctgtatggcgtaaactcatatagcaagtgtgtatttcggtagttctcttcttcttcgagtagctcgagcaattcgatttgctcttcgtcgctcaggttatcaagaatcgcgtccagttccacggttgaatagctccttgatacgagagcggcgcttatcgcgatctcccttatcaggtgtcacgtcttcaaattgcgactgctctttgaggcccaaatcgcgggcgatgatgttagcgttgagaagatcagcggctgcgccggagaatttctggtcgtagatgatttgctctgctcgcgtaacgacctcagataagtcttctctcaccctgtattgtcgccatgtctcaagcgtcacatcgaggaatagcgttagcccagtgatggtcatcgccctcatcttggcaataggctcttgtgtaacttctccttgatatgagaaagccttcatctcccatagtgggttagcctccacccactcgaagtattcacaacaagcagcccacagcgcctcaggcgactcgaatttcgggttacgcccatggctactgcgggcctcccagaatcggttgccctttggtgctgccataagttaacttcctgatgttgtttcgatagtcacgttagccgaaccatcaaaggacgctgaacctgtgaccgctccggttagtgtgatagtgcgggcagtagataacttatccgccgtctctgcattagctactgaaccgcttgcagaagtgtagttagcttcaaatgctgtcttgctcatatagagcagctcgccgtactggctccggaacagatatccgccaacctccggcttgaatacggctactgtttgcgctgacatgtactggtcagcatacgggccgtcgaattctgcgtttgcacttccgtcattagcgtatttgatagctttaatcggaagcgcagacacatatacaccgtcagcatctttgtatagaggccatgatggcgtgaagtttgggtttgccattacttggctccttctttttctggttcatgaaagaacggcaggaagtgactgaacattctgtcaagcatgtagcagtaggtttcgtttgcgtcgccaggataagtggttacaccaacatctcggcagacataaaatgcaacgtgagcgcattcatgaaccaatgtggccgcctcaccattgaatacaccaagcaggtaaagattctcgcctgtttcggtattgcaatatgactgtgttgcccccgccagcatctcattcccgccgctaccaactccaagatgaatgcaagcctgatcccactcttcctttgaacgacacaggtagacattggcgctatggaacaatggcacgaagaaccggggaagtttaggccacttcgtctttgccattcgttatgctccggcagtgaacaggtctaacgcttcttttgcctcacgaatagccttttctgcgcgagctaatgccgttccttcaccctgcgccaaaaccagttggtctttgaacagttcgaagttcagcttacttccagcaacgaatgcgatcgctttctctgctgctgcggtatcgctttgaactaaacggaggatatcgaggttcatctgctgtaattctgtcaatgctgtaatctctgccattgtgttggctccggttgttgggataagccattgtctagaccactcattgaatggcctctgcaataaccgatgtctttccatcagtccgccaccacaaagaatcttttttgccataaggctggaggttcatctttcagtggctgccagtgttatttccccacttactggcttgggttgtttcgcggtactgccgtaatgtacaaactggattaaccagcagaatcacaccattccgggcaaatacatttgcacttcatttgctgctctctcacgtgcaacatgaagcaatcttgttcgcccaccaacgccccacttagccatttgacttgcacactggcttatcgctttggtttcagtgctgatgatgtggtcaattttgttcaggcgagacatggcaccaacgccgagacggacaatcgttttaaaaacttcataaacctcgatttcaaattccggcttaatccatgctgcatatctgattgccagtagttcaacgccccacacaccaggttcggtaccacctttaatgattttaagtggttgaatttgtttcaaagtgcttttttgcactttggcctctagtgcttttatgaagcgttttatctgcgcgctacacaaaaacttgcttgggcgctgttgctctgtagcctctccatttgcaactgctgctgcatggagatcgtttaagttgtagcgtccgtcctcatcaacacgaacggacacaccattgaccataactgttgggtacttcatcagtgatcacctttaagtgatgaaccttgtcacacaggattccggcccacagaaaggtaccgatcaccaaaccggcatcctcaagggtcatcctgaaaggttctgtgttcagaagtcgcgcgtgtgaagcgcatttactgcggatacaaaaaagcccggcattacgaggcattttcatgaaagtcacttgtcaaatttctatgtgatggaaattatttcaggcattgcgtcctgatgtactcctgaagcgttctcagtgctgcttggtcgctgatgattccgtcccggataccgagaacgtttcgtccagcaactggagagagttcgacggtggcatcattgcccatgccggaggcgctggaggtttcggctgaggatgacacagggcattttcctttgacgagcacccgaccaccattatcaagcttgcgccgaagagcatcattctcagctttcgcatcagcaagctcctttgtgtatctggcgtcaagttctgctacatcacgctggcgcgtttgcatatcggtaattgtcgcgttcgccagcgccagcttttgagtaacagtgtcgcgctggactttgtaggtgatggcgttatcacgataatgattaacagcccatgacaggcagacgatgatgcagataaccagagcggagataatcgaggttaatctgctcattgcttaccccacaaacagacatcacgctcaacctcacgacgagtcatcaggcctttccattgcttaccgccagcgtatgtccagcgacgtagctgatcacatgcacctttgatatcaccctgattgattttgcgaagaagcgtcgatgttctgaaattgcctgcgcccacattgtaaacgaacgagtaaagagcgccgcgcgttgtttccggtatatctactttgatgtacgggttaatttgtctggcgacagtgataaggtctttattcaggagggctttgcattctgcttcggtatacgttttaccaggcatgatgtcttttccggtgtggccataacacacagtcaacacaccgactacgtccttatatggtttgtatctgacaccttccagaccatcgttaccaccggggccagtgattaacacagatgctatagcaatagccccgccacttatcgccgccattacgctatttcgtagtgccggtgacattgccattcaatctgtcctcacgctctttgcgtttgtagtaccagttgatgccaaatgtgccgacagtacaaagaataccaatgatgacagcccagtcattcagggagagaatgccacccatcgcagtcagtcctccgaagctgtaactgaaccattctctgattttgtccatacggtacatgctctaccccttcattgaggggatttgctctatttaattaggaataaggtcgattactgatagaacaaatccaggctactgtgtttagtaatcagatttgttcgtgaccgatatgcacgggcaaaacggcaggaggttgttagcgcaacctcttgcccccatcctcacgaagcccagccatagtgctgggttttcttttgtgtaaaacgccctacccagtcgccacgaatgagcaagggtatctggatatgttctggtgattggtgatagggcgctttcagaaatgtcgttcttaaaacgcaaaaagccccgcatcattgcagggccttttttttaaatccaccttaacaaagcacggatttctactgttagggttatgatattctacttttcgtcattttgcaagatacaatcgttatcggaataaaacttagctggtaactttcgataaaactacatttgcagcagactcctccatttcaaccttgctaattaatgactcatagaatggcttaatagccttatcccatacgcctggtgaaattgcagcggtgaactgacatatcgcacgaaagcatgaggccgcaggtatgcgctcatacccacgccctgagcactgcttgcaggatgaataaactggagcgccctgtagttctgatttcttcctgtccagcgctacgccacgcccacggcatttaacgcaagatgtagatacaacacctgcaccattgcatttagtgcatagtgattccgttacctccacagccgtctttgcaggagttttctctccacacccaggatgtttaacgatccgcttcttattccttaatactccgcgccccttgcagcacgaacacatgacattactagctgccgaccggcagtaatcctgatacgcgaaagttgcgagcgtttgcactactttccctttaacattggtatcaagtttgcgtaaggcagccaccttgtcgcaatgcttcatcccatgctgtaccagtaactgaattgccttacgcttatcgttgtcgctcaggttcatcttgccgctgaaagcactgaacccgagcggagcgcgactttgcgccataccaaatgctgccatcacatcggtattagtcagtgagtctgatgccgttgctctcggtgaatctgatagttgaggagacttcggagagtggaatttcacagtgttttccaaattcatgcagcatcgcctcccgatgtcttgttcaatccaagccggttcaccagttcacgctctcgctcatgcagataatccatcgccttctggtgttgctccgtcatctctctgacgctgcgcaattcagcttcgtcacgttcacactgctgtttcgcctggttaatgctggttacggtcatagatacctctcccgccctgatgaatcattaaaacgccgttaacgatggcgtgatacctggcttctttgtcgtacagataacgcctgactgtgtttcgatggcacgacaatcgcctggctacttctgtctggtttccgtatgtctcaatgagcatgtctggaatggttttgatagtgtgtgtcatgcggcctcccggataacctgctcatggctcagatattgaccccagcaactgaccaacaatctcgctttcacaacggctttctcttcgttgcgccacctgcagaaccagttaacagcgccttccatttcttgcctgaccttgccggcattgtcgaaatgcagcggatagacaacatcatcgaaaattgccgcagtggtcattgggtattggattttgctcatgctgcctctcttctgctgtcacgcaggtctttaagtttctgctgatactccgccttaatcgctttgcattcttcgatagtccagcgatggcggttatggtttgattcgatttcgtctactgcttcctgcccgatgcgattaatcagttcgacgcgatacggaacgagatttccgcttttgtgctggttgcacaccacgcattgcttgtgaatattgcgttcatcaaatcggagttgaggtgccgcagcagttgtccggtaatgcccggcatcccactgagcagacgtgagcgttccgcacgagacacatggtaagtcgcggtctctttctctgatgagggcgtttacggcttgttgggcttgtttaatccagtaactgcggggctttaaggcgagttttcgaatcttcagtttatctttctgtttctgttcctctcgtcgtcgtttcttctctgctgctttttccgctttttcgcgttctttgcttcgtcgctcgagtgctatcttggttccacactctggagagcaccaccactgattagcgaatgcagggtgaaaccattccctacattcttcgtttttgcatcgtcttcgcgctggtttagccatcgtcttcttcctcgtacattgagctattcggatcgctcatcagttctgcgcagcagtgctcacatacgtgaacttccagcacatgcagcttctgaccgcagttagcgcacgttaaagcccgctcgacgctttctttctggtattgaagggattgggatggactaagcattattggcgtcctgcatcatgagaaagacaatcatggcggcgcggagaggtctggtatcaaatattgggcttacgccttttgcatccacacaccattcagttaactggtctaagatagaaatcctgtgtttctcaataatcggccatgaggcactcggatcattgcagtaatcaggtaaatggtttaatggctcaaaagttgtatcagcgtttccgtaataccatttgttggtgttattccctgacgtttccggcttacatgcccaaaggcctttaaaaattatgtctcctaccattcggttaatttcaaaatcacttaactgtgaataatccattgtcatttcctcgcacgttctctaagccaccggatatcccacaggtgagccgtgtagttgaatgtttttacgtcagattcttttgggattggcttgcgtttatttctggagcgtttcgttggaaggtatttgcagttttcgcagattatgtcggtgatacttcgtcgctgtcgtgccatacgtcccccttcgtctctggcagcgggaaattacctactggcgaccgctcacatctgatacaccattggtgccaataaggttgatttggccggaatcgataatcgtctttgctttctccgcagcggtagcagtgtttcatgcggcgtctccaaacctcgctttccattccagtgctaaccgggcttcgtctgaccacttaacgccgcgctctgtaccgaatgcctgtataagctctaatagctccgcaaattcgcttacacgcatcctgctggttgactggcctattaccacaaagccattcccggcaaggttaggaacaacgtcctgctgctttaatgccgcggtaaacacacacttccagctttcagcgtcaagccatcgtccatgccagttaacctgacgtgagacatcacaaaggcaagcccaaagcttccgattttggtctaagctgcggttgcgttcctgaatggttactacgattggtttggttgggtctggaaggatttgctgtactgcgtgaatggcattttgctgatgtgctggagatcgaatttcaaaggttagttttttcatgtcttccctctcccccaaataaaaaggcctgcgattaccagcaggcctgttattagctcagtgatgtagatggtcattgcttcatctccctttccatttcatcaatgtcaacgtcatcaggaagatgggagcaatacgctgctataccatgatgatttatctcataccctttgaacgttgccatctggtgcgtaatctcaacttcgtttaggaatccgtcatcgcataactgcctggctattttcgatttggtctggattattggtagtgcctgttctttcaaagcgtatgatatttgtgcatcccatgccttttcgagaatggctaattgttttttattcatacgtcagccccttgtgcatatcgtctgccacgcgcagcaggtgcatttgatgctgtgcaaatctgtctggcttcatcctggtcacatgcaacaaagtgtccgttgcagaaccgctggtaaaccgtaccaagcgagccaaaacggtttttcgtcacaatgatttcagcaaatggtgcggcgctactgttctcgtcgtataccgcttcacggtaaagcatgatgattgagtctgcatcctgttcaatgcttcctgaatcacgcaaatctgcgtttgtcgggcgcttgtttggccgcttctcaacatcgcgtgaaagctggcttagggagataactggagttttcaggtctttcgccatcgctttcaggctaccggagatatgtgctatggcgaggtcattacgttccgcttttggtttctcaattagcccgagatagtcagccataatcagtgacagattaggatgctcctgcttgtggcgttcggaaatggacctgatttcttcgacagacaaacgcgatgcgtcaactacccacacatccagatctgccagcaacttcatcccgcttgcaactctcgcccatccttcatcgtccattcgtgacgggttacgcagcacactgaccgacatcattcctgcgccggcaatccctctctcaacaacctgaatggcgctcatttccatcgagaaaatcaacacaccgcgccggacgccagaaccaggaataacacgacttgccacgccttcggctatcttcagcgccagttcggttttacccatacctggacgagcagcaataatcacaaggtcttctgcgttcattcctccggtgatagcgtcaagctcttcgattccggtcttcagggtatccgactcttctccgttcctcagacgcctgtcaagcgtgtcagtgtaatcattgataatttcccccagtcgcacaggtttaacctcgttgcgtggcttcctgatggctgaaagacgcttaacaagatcgtccatcgctctacctgaagcatccagcgtgccgttactgattggctctcgcatctcatccagtagctgtaaaacctgacgccgttgataactgtctacaaccattccggcataacctttcaggtttgcagcgctgggacatgaccgcgcagtcatcatcaccgccgttgcgtattcatccccgcactcctcggccaccatcagtccatcaatcaggttcctgtttctggcctgctttcgaataacttcaaaagctttccggtaaagcggaattgagaatgcttcaggctccagcgttgccagaacgtcactcgcggttggtgttaatccaccaatcagcaagccaccgataacgctcgcttcgatatcctgtctcatgcaatccccctgtctgcaaacttcccttcccgaactcccgttaacgaatcttccctcagcaggtaatcaaaatcagccgtccagcctgtgtcgttgtctccgaagtaaaacggcttggcctgatgcacaaacgccctgacatacgccctgaaaccgtccacgtttggcgttttcagttgcgggatgattttcttcaggcggcgtttccgtttctcgttgaccgaaacagcatgtggaagtctgtcaccgacttcggtgttgtaggcgttcaggaaggattcgtagtcgattcgttctgccttgcgacgttcaggtttaacctgcccatcgccgcccccgttagggggtaagggggtatttgtatttattgtcttttgtatattgtcttttgtgtttagctgacttggcttatacccattagccgacttggctaatgttttattagctgttttagctaatgttaagctgtcctggctaatccactgcgaaaccaccttgttcactccgattttcacgccatcagcaatgaggaatttacgctcaataagctggcgcttagcagcgcaaacatgagtgtgatgaatacctgtcatggctgctatctgcgtgtttgtgagtcgatccatcggcttattgaatccgtatgtcttgcgcatgatagcgagcatcaccttcaactgccggacggttaaatcagccatcagcagactgtcggtaatctcgttagcaacgcgcatgaaaccatcttcggtatctgccacgcgatgctccacgacctccagatgaggcctgtaatcagctaacttaacgacgcccatgtttcactcctgctttggctagtctgtaaacaccaacaaggcgctctgcgaacgccctgttatttgctgcggctactactaatccctcaggtgaatcagggtgtcgaatctcttctttttcctggtatttcttacgacgttttgtcataatgactcctgtggattgatccagtctttctacatcaggcctcgaagaattcgccgttcttcggggctttttcttttgtcaggtaggtagcaagtcgcctggtgagctctgccatttcctcgtcttcgattccatactccagaaccgcaagcatcatgctgacctgagagaagaaaccgttcttccatcggcttacctggtattcaggaacacccatagctttagcgaatgtcttctggcccatcatggctaacttgttgagtaaggtggactcgatgcgagccgccttcttgcttttagttgcaactacgttcattcaaaatattccttagaaattagatagagttggattcgcaaatacacgcaaatccgtttaatagatttaccgcgttgtcggcggttcagattggtaaagagcgttgatacttaacttgctgccagtaagtcggctaaatcaggacgaagttctctggctttaattcttcctcctgtagcttttacgattgctgccacatacttagcgtcaatgccgccaccatgtaaccaacgccatacagttggctgcttaactccacacaaagaggcgagtttttgctggcttcctgcaatggcaacagctttttgtattgctttgttagtcattgcttattccctttcgtataacacacaacaaataatagcaatgagtattaatcaaagcaatagcaaaacgtgttttgaccattaatacgcaagcgtataaattgaatattatgaaaaaagaaactctctctgaccgtctcaacaaggcaatggaactggctggtatgtctcaaggtgctctcgctaaagcgtcaggcgttgctcagccaacgatctggcgtttgacaagtggaaacgctcgtgggtcaacaaagattgttgaaatagcaaacgcgttaggtgttaattcggaatggttgtctaccggaattggtcctatgaaaaaagatggaactactccgataaacgcatctccatcttcaaacacatttaaaatcgatatcctagatcttgaagttagcgcgggtcctggcgttatcaatcgagaattcgtggaaatactccgctcggttgagtattcgcaggacgatgccagacacatgttcgatggtagaaaggctgaaaatatccgcatcataaatgtgcgcggagatagcatgtcaggaactattgaaccaggagatctgttgtttgtagacgtaagcatcaaaaacttcgatggggatgggatatacgccttcctctatgacgatactgcacatgttaagcggctccagaagatgaaagataaactattggtcatatctgataataagagttattcagcttgggacccaattgaaagagatgaaatgaatagggtttttgtctttggaaaggtaattggaagcatgccgcagacctataggaagcacggttagccagccaatggcctgatgagatattcgggtgatgatggaccgaagggatgtttgggtgatagtgattgtgtgaaacaggtcgcagaaatgcggcctttttacaaaaaaatgcaagcactcaagatagaatatatgcttgcttattaatttatatacttgatattatgcaagcacatttcacaacaaagagtgcttgcataatgtctgataaagaaagcaaagaaccaacgggaaagtccaaaggtggtgtggcaagggctaatgctctttctgcagaagaaaggtcggctattgcaagaaaagccgcagcagctaggtggggtggcgatggtgaggtggaaattgccaaaagatctggcgacattgtcattggagacttaaagatacaatgtgccgtgcttgaggatgggacgagggttctgtcagagagagctatcactaaagccttcggcgggaagcgtggaggctcccactggaagagaatgaaagagaatccagatggcgcctatcttcctgttttcttgtcagctaaaaacattaagccattcattaataatgaattatcagaaggcctatcccggcgccgtcttttcaaaataaataaaggagcggcgccagcttacggcattgaagcatctttgctcccaaagatatgcaatgtttatttgaagatgagagatcagggtgatgcccttcagtcatctcagatacctatttctgttcaggcagacattatcatgcgcggtcttgcagaggttggtattgtagcgctggtagacgaagctactgggcatatcgatgaaaagagacaagatgaatatcgaattctctttcaagagttcatcaaagagcaggtcagagaatatgagaaggaatttccgaagcagttcacggatggcctttatcgactttacggacttacgcagaaaaaagcaggtcggcaccctcagtttttcggtaagtttacgaggaagtatatctacgaaccattagcatcaagtaaaggcgccatccttgagatgctagatgaaaaaaaccctgtcgtttatgcgaatggcggtagaagatataagatgtttcagttcctaaccgatagcatcggagttccgatgtttagggcgcacctttggcaggtagttggcatcctttcaagctcaagaaataaagctgagtttgacagagcattcaaaagagcctttccatcgcccgggactcaatttgagttgctagatgaagatgagtaagcgatcacgcccggccaccgcgccgggttttctttgccctactctttcggcagcgtcagaacatcaatagccagttctacagccaagtccacatcctcttcctgccacagtacctgaatcatttctatcaaagcttcacgcgaaggttcgcgctgctctaccagtacctgcatcagcgctgtaccgagaacctcaaccacctgcgggtgaagctccgcaaagaactcttcctcacttttcacactgattcctcgctcgttttttgttcagaacagtatggcatagaggatttataaaaataaattcattttgctatcaacaacataataccaaaaaccactaattaatagcaaaacgtattgatatggataatactcaatgctattgtttagccatcagcaggacgctggtagccaaacggaaaggcaacgctctttaacttcgatgatgcgctgacaaagcgcgaacaaataccaaacgagatgggtttgggttgcaggtagaagccaacctcttcggcggaggcgctcggcaatgagtacgcggtcagggttagtcgcctggctatctgcaacaccaaagctatttcacatgaggattaaatcatgacggttatcacctacgggaagtcaacgtttgcaggcaatgctaaaactcgccgtcatgagcggcgcagaaagctcgcaatggagcgcgacaccatctgcaatatcattgattcaatttttggctgcgatgctcctgatgcttctcatgaggttaaagccaaaagaattgaccgcgttaccaaagccatttcgcttgccggaacgcgtcagaaggaagttgaaggaggatctgtacttcttccagacgtagcactttacgcggcagggtatcgtaagagcaaacaaataacagcgaggtaaaacatttgtcggttaagtcgttatttttttggcctgctcgtcctgtgcaataagttcattcataagaatgtctgactccccggcaaacctaatgtagcactcatttctatagctttccgggataacaaaacggtcggtatcaggatatccagtagcagaaggtatccgaataagaagccctttttcgagcaatgaaattgcttcagggcttcccttttctgtctttagctggttattagcggctacagcgaatgccaaatacgctctttctccaagagttaacgaatcaaacaaatcccgaacgactttttcttctctggccttacgctgctgagcagttgatgcctcaattctttcattcacgacatgataaacagaattaacaacaccattcagcacatagctaacacagaacagcaggatgtaatacatccagtactgaggaaggatttctggattatgcaggtttacccattctttcacgcttaccggcataacgacaatcagtaaaatcaggatgatgatcatatgaatcaactgtttaagtgtcattccttgcaggaaaaaacgcattagctcctgccaccatgagttgttcatcggcgattctcttttgctctctgtaggggtgaatagagtttatccgatttctcgctgtaggggtacacgagaaccaccgagcctgacgtggttaaaagacaggcacaatctttactaccgcaatccactatttgagatgagatatggaagaagaatttgaagagttcgaagagcatcctcaggatgtgatggaacaataccaggactacccatatgactacgactattgatacaaatcaatggtgtagtcgttttgtgaaatgcaaaggctgcaagcttgatgctgaatgtatggtgaagcctgaggaaatggctctggtgagagaagatggaaagattgtcgataaatgggcaatcagaaccacggcaatgattgccagagagctggaaaaactaaagtctacatagttggccttcttttatctcacttcaaatatctaatcaggtcgcaatgcggccttttttattgccaaaatttaaggaataacaacatgaattcagcagatttatcgaagattcttgaagaacacaaagtgtggattacctcaatgcgtgagagcggatctagagccaacctgtacggtgccgacctgtacggtgccaacctgcgcggtgccgacctgcgcgatgccgacctgtgcggtgccgacctgtacggtgccaacctgcgcggtgccaacctgtacggtgccaacctgtgcggtgccgacctgcgcgatgccgacctgcctgatctcactttcgtaattctggg

SEQ ID NO: 7 - DNA, 41117 bp, unidentified
  source 1..41117: mol_type = unassigned DNA
  misc_feature 1..41117: note = the genomic sequence of a bacteriophage
ggcaccgtacaggttggctctagatccgctctcacgcattgaggtaatccacactttgtgttcttcaagaatcttcgataaatctgctgaattcatgttgttattccttaaattttggcaataaaaaaggccgcattgcgacctgattagatatttgaagtgagataaaagaaggccaactatgtagactttagtttttccagctctctggcaatcattgccgtggttctgattgcccatttatcgacaatctttccatcttctctcaccagagccatttcctcaggcttcaccatacattcagcatcaagcttgcagcctttgcatttcacaaaacgactacaccattgatttgtatcaatagtcgtagtcatatgggtagtcctggtattgttccatcacatcctgaggatgctcttcgaactcttcaaattcttcttccatatctcatctcaaatagtggattgcggtagtaaagattgtgcctgtcttttaaccacgtcaggctcggtggttctcgtgtacccctacagcgagaaatcggataaactctattcacccctacagagagcaaaagagaatcgccgatgaacaactcatggtggcaggagctaatgcgttttttcctgcaaggaatgacacttaaacagttgattcatatgatcatcatcctgattttactgattgtcgttatgccggtaagcgtgaaagaatgggtaaacctgcataatccagaaatccttcctcagtactggatgtattacatcctgctgttctgtgttagctatgtgctgaatggtgttgttaattctgtttatcatgtcgtgaatgaaagaattgaggcatcaactgctcagcagcgtaaggccagagaagaaaaagtcgttcgggatttgtttgattcgttaactcttggagaaagagcgtatttggcattcgctgtagccgctaataaccagctaaagacagaaaagggaagccctgaagcaatttcattgctcgaaaaagggcttcttattcggataccttctgctactggatatcctgataccgaccgttttgttatcccggaaagctatagaaatgagtgctacattaggtttgccggggagtcagacattcttatgaatgaacttattgcacaggacgagcaggccaaaaaaataacgacttaaccgacaaatgttttacctcgctgttatttgtttgctcttacgataccctgccgcgtaaagtgctacgtctggaagaagtacagatcctccttcaacttccttctgacgcgttccggcaagcgaaatggctttggtaacgcggtcaattcttttggctttaacctcatgagaagcatcaggagcatcgcagccaaaaattgaatcaatgatattgcagatggtgtcgcgctccattgcgagctttctgcgccgctcatgacggcgagttttagcattgcctgcaaacgttgacttcccgtaggtgataaccgtcatgatttaatcctcatgtgaaatagctttggtgttgcagatagccaggcgactaaccctgaccgcgtactcattgccgagcgcctccgccgaagaggttggcttctacctgcaacccaaacccatctcgtttggtatttgttcgcgctttgtcagcgcatcatcgaagttaaagagcgttgcctttccgtttggctaccagcgtcctgctgatggctaaacaatagcattgagtattatccatatcaatacgttttgctattaattagtggtttttggtattatgttgttgatagcaaaatgaatttatttttataaatcctctatgccatactgttctgaacaaaaaacgagcgaggaatcagtgtgaaaagtgaggaagagttctttgcggagcttcacccgcaggtggttgaggttctcggtacagcgctgatgcaggtactggtagagcagcgcgaaccttcgcgtgaagctttgatagaaatgattcaggtactgtggcaggaagaggatgtggacttggctgtagaactggctattgatgttctgacgctgccgaaagagtagggcaaagaaaacccggcgcggtggccgggcgtgatcgcttactcatcttcatctagcaactcaaattgagtcccgggcgatggaaaggctcttttgaatgctctgtcaaactcagctttatttcttgagcttgaaaggatgccaactacctgccaaaggtgcgccctaaacatcggaactccgatgctatcggttaggaactgaaacatcttatatcttctaccgccattcgcataaacgacagggtttttttcatctagcatctcaaggatggcgcctttacttgatgctaatggttcgtagatatacttcctcgtaaacttaccgaaaaactgagggtgccgacctgcttttttctgcgtaagtccgtaaagtcgataaaggccatccgtgaactgcttcggaaattccttctcatattctctgacctgctctttgatgaactcttgaaagagaattcgatattcatcttgtctcttttcatcgatatgcccagtagcttcgtctaccagcgctacaataccaacctctgcaagaccgcgcatgataatgtctgcctgaacagaaataggtatctgagatgactgaagggcatcaccctgatctctcatcttcaaataaacattgcatatctttgggagcaaagatgcttcaatgccgtaagctggcgccgctcctttatttattttgaaaagacggcgccgggataggccttctgataattcattattaatgaatggcttaatgtttttagctgacaagaaaacaggaagataggcgccatctggattctctttcattctcttccagtgggagcctccacgcttcccgccgaaggctttagtgatagctctctctgacagaaccctcgtcccatcctcaagcacggcacattgtatctttaagtctccaatgacaatgtcgccagatcttttggcaatttccacctcaccatcgccaccccacctagctgctgcggcttttcttgcaatagccgacctttcttctgcagaaagagcattagcccttgccacaccacctttggactttcccgttggttctttgctttctttatcagacattatgcaagcactctttgttgtgaaatgtgcttgcataatatcaagtatataaattaataagcaagcatatattctatcttgagtgcttgcatttttttgtaaaaaggccgcatttctgcgacctgtttcacacaatcactatcacccaaacatcccttcggtccatcatcacccgaatatctcatcaggccattggctggctaaccgtgcttcctataggtctgcggcatgcttccaattacctttccaaagacaaaaaccctattcatttcatctctttcaattgggtcccaagctgaataactcttattatcagatatgaccaatagtttatctttcatcttctggagccgcttaacatgtgcagtatcgtcatagaggaaggcgtatatcccatccccatcgaagtttttgatgcttacgtctacaaacaacagatctcctggttcaatagttcctgacatgctatctccgcgcacatttatgatgcggatattttcagcctttctaccatcgaacatgtgtctggcatcgtcctgcgaatactcaaccgagcggagtatttccacgaattctcgattgataacgccaggacccgcgctaacttcaagatctaggatatcgattttaaatgtgtttgaagatggagatgcgtttatcggagtagttccatcttttttcataggaccaattccggtagacaaccattccgaattaacacctaacgcgtttgctatttcaacaatctttgttgacccacgagcgtttccacttgtcaaacgccagatcgttggctgagcaacgcctgacgctttagcgagagcaccttgagacataccagccagttccattgccttgttgagacggtcagagagagtttcttttttcataatattcaatttatacgcttgcgtattaatggtcaaaacacgttttgctattgctttgattaatactcattgctattatttgttgtgtgttatacgaaagggaataagcaatgactaacaaagcaatacaaaaagctgttgccattgcaggaagccagcaaaaactcgcctctttgtgtggagttaagcagccaactgtatggcgttggttacatggtggcggcattgacgctaagtatgtggcagcaatcgtaaaagctacaggaggaagaattaaagccagagaacttcgtcctgatttagccgacttactggcagcaagttaagtatcaacgctctttaccaatctgaaccgccgacaacgcggtaaatctattaaacggatttgcgtgtatttgcgaatccaactctatctaatttctaaggaatattttgaatgaacgtagttgcaactaaaagcaagaaggcggctcgcatcgagtccaccttactcaacaagttagccatgatgggccagaagacattcgctaaagctatgggtgttcctgaataccaggtaagccgatggaagaacggtttcttctctcaggtcagcatgatgcttgcggttctggagtatggaatcgaagacgaggaaatggcagagctcaccaggcgacttgctacctacctgacaaaagaaaaagccccgaagaacggcgaattcttcgaggcctgatgtagaaagactggatcaatccacaggagtcattatgacaaaacgtcgtaagaaataccaggaaaaagaagagattcgacaccctgattcacctgagggattagtagtagccgcagcaaataacagggcgttcgcagagcgccttgttggtgtttacagactagccaaagcaggagtgaaacatgggcgtcgttaagttagctgattacaggcctcatctggaggtcgtggagcatcgcgtggcagataccgaagatggtttcatgcgcgttgctaacgagattaccgacagtctgctgatggctgatttaaccgtccggcagttgaaggtgatgctcgctatcatgcgcaagacatacggattcaataagccgatggatcgactcacaaacacgcagatagcagccatgacaggtattcatcacactcatgtttgcgctgctaagcgccagcttattgagcgtaaattcctcattgctgatggcgtgaaaatcggagtgaacaaggtggtttcgcagtggattagccaggacagcttaacattagctaaaacagctaataaaacattagccaagtcggctaatgggtataagccaagtcagctaaacacaaaagacaatatacaaaagacaataaatacaaatacccccttaccccctaacgggggcggcgatgggcaggttaaacctgaacgtcgcaaggcagaacgaatcgactacgaatccttcctgaacgcctacaacaccgaagtcggtgacagacttccacatgctgtttcggtcaacgagaaacggaaacgccgcctgaagaaaatcatcccgcaactgaaaacgccaaacgtggacggtttcagggcgtatgtcagggcgtttgtgcatcaggccaagccgttttacttcggagacaacgacacaggctggacggctgattttgattacctgctgagggaagattcgttaacgggagttcgggaagggaagtttgcagacagggggattgcatgagacaggatatcgaagcgagcgttatcggtggcttgctgattggtggattaacaccaaccgcgagtgacgttctggcaacgctggagcctgaagcattctcaattccgctttaccggaaagcttttgaagttattcgaaagcaggccagaaacaggaacctgattgatggactgatggtggccgaggagtgcggggatgaatacgcaacggcggtgatgatgactgcgcggtcatgtcccagcgctgcaaacctgaaaggttatgccggaatggttgtagacagttatcaacggcgtcaggttttacagctactggatgagatgcgagagccaatcagtaacggcacgctggatgcttcaggtagagcgatggacgatcttgttaagcgtctttcagccatcaggaagccacgcaacgaggttaaacctgtgcgactgggggaaattatcaatgattacactgacacgcttgacaggcgtctgaggaacggagaagagtcggataccctgaagaccggaatcgaagagcttgacgctatcaccggaggaatgaacgcagaagaccttgtgattattgctgctcgtccaggtatgggtaaaaccgaactggcgctgaagatagccgaaggcgtggcaagtcgtgttattcctggttctggcgtccggcgcggtgtgttgattttctcgatggaaatgagcgccattcaggttgttgagagagggattgccggcgcaggaatgatgtcggtcagtgtgctgcgtaacccgtcacgaatggacgatgaaggatgggcgagagttgcaagcgggatgaagttgctggcagatctggatgtgtgggtagttgacgcatcgcgtttgtctgtcgaagaaatcaggtccatttccgaacgccacaagcaggagcatcctaatctgtcactgattatggctgactatctcgggctaattgagaaaccaaaagcggaacgtaatgacctcgccatagcacatatctccggtagcctgaaagcgatggcgaaagacctgaaaactccagttatctccctaagccagctttcacgcgatgttgagaagcggccaaacaagcgcccgacaaacgcagatttgcgtgattcaggaagcattgaacaggatgcagactcaatcatcatgctttaccgtgaagcggtatacgacgagaacagtagcgccgcaccatttgctgaaatcattgtgacgaaaaaccgttttggctcgcttggtacggtttaccagcggttctgcaacggacactttgttgcatgtgaccaggatgaagccagacagatttgcacagcatcaaatgcacctgctgcgcgtggcagacgatatgcacaaggggctgacgtatgaataaaaaacaattagccattctcgaaaaggcatgggatgcacaaatatcatacgctttgaaagaacaggcactaccaataatccagaccaaatcgaaaatagccaggcagttatgcgatgacggattcctaaacgaagttgagattacgcaccagatggcaacgttcaaagggtatgagataaatcatcatggtatagcagcgtattgctcccatcttcctgatgacgttgacattgatgaaatggaaagggagatgaagcaatgaccatctacatcactgagctaataacaggcctgctggtaatcgcaggcctttttatttgggggagagggaagacatgaaaaaactaacctttgaaattcgatctccagcacatcagcaaaatgccattcacgcagtacagcaaatccttccagacccaaccaaaccaatcgtagtaaccattcaggaacgcaaccgcagcttagaccaaaatcggaagctttgggcttgcctttgtgatgtctcacgtcaggttaactggcatggacgatggcttgacgctgaaagctggaagtgtgtgtttaccgcggcattaaagcagcaggacgttgttcctaaccttgccgggaatggctttgtggtaataggccagtcaaccagcaggatgcgtgtaagcgaatttgcggagctattagagcttatacaggcattcggtacagagcgcggcgttaagtggtcagacgaagcccggttagcactggaatggaaagcgaggtttggagacgccgcatgaaacactgctaccgctgcggagaaagcaaagacgattatcgattccggccaaatcaaccttattggcaccaatggtgtatcagatgtgagcggtcgccagtaggtaatttcccgctgccagagacgaagggggacgtatggcacgacagcgacgaagtatcaccgacataatctgcgaaaactgcaaataccttccaacgaaacgctccagaaataaacgcaagccaatcccaaaagaatctgacgtaaaaacattcaactacacggctcacctgtgggatatccggtggcttagagaacgtgcgaggaaatgacaatggattattcacagttaagtgattttgaaattaaccgaatggtaggagacataatttttaaaggcctttgggcatgtaagccggaaacgtcagggaataacaccaacaaatggtattacggaaacgctgatacaacttttgagccattaaaccatttacctgattactgcaatgatccgagtgcctcatggccgattattgagaaacacaggatttctatcttagaccagttaactgaatggtgtgtggatgcaaaaggcgtaagcccaatatttgataccagacctctccgcgccgccatgattgtctttctcatgatgcaggacgccaataatgcttagtccatcccaatcccttcaataccagaaagaaagcgtcgagcgggctttaacgtgcgctaactgcggtcagaagctgcatgtgctggaagttcacgtatgtgagcactgctgcgcagaactgatgagcgatccgaatagctcaatgtacgaggaagaagacgatggctaaaccagcgcgaagacgatgcaaaaacgaagaatgtagggaatggtttcaccctgcattcgctaatcagtggtggtgctctccagagtgtggaaccaagatagcactcgagcgacgaagcaaagaacgcgaaaaagcggaaaaagcagcagagaagaaacgacgacgagaggaacagaaacagaaagataaactgaagattcgaaaactcgccttaaagccccgcagttactggattaaacaagcccaacaagccgtaaacgccctcatcagagaaagagaccgcgacttaccatgtgtctcgtgcggaacgctcacgtctgctcagtgggatgccgggcattaccggacaactgctgcggcacctcaactccgatttgatgaacgcaatattcacaagcaatgcgtggtgtgcaaccagcacaaaagcggaaatctcgttccgtatcgcgtcgaactgattaatcgcatcgggcaggaagcagtagacgaaatcgaatcaaaccataaccgccatcgctggactatcgaagaatgcaaagcgattaaggcggagtatcagcagaaacttaaagacctgcgtgacagcagaagagaggcagcatgagcaaaatccaatacccaatgaccactgcggcaattttcgatgatgttgtctatccgctgcatttcgacaatgccggcaaggtcaggcaagaaatggaaggcgctgttaactggttctgcaggtggcgcaacgaagagaaagccgttgtgaaagcgagattgttggtcagttgctggggtcaatatctgagccatgagcaggttatccgggaggccgcatgacacacactatcaaaaccattccagacatgctcattgagacatacggaaaccagacagaagtagccaggcgattgtcgtgccatcgaaacacagtcaggcgttatctgtacgacaaagaagccaggtatcacgccatcgttaacggcgttttaatgattcatcagggcgggagaggtatctatgaccgtaaccagcattaaccaggcgaaacagcagtgtgaacgtgacgaagctgaattgcgcagcgtcagagagatgacggagcaacaccagaaggcgatggattatctgcatgagcgagagcgtgaactggtgaaccggcttggattgaacaagacatcgggaggcgatgctgcatgaatttggaaaacactgtgaaattccactctccgaagtctcctcaactatcagattcaccgagagcaacggcatcagactcactgactaataccgatgtgatggcagcatttggtatggcgcaaagtcgcgctccgctcgggttcagtgctttcagcggcaagatgaacctgagcgacaacgataagcgtaaggcaattcagttactggtacagcatgggatgaagcattgcgacaaggtggctgccttacgcaaacttgataccaatgttaaagggaaagtagtgcaaacgctcgcaactttcgcgtatcaggattactgccggtcggcagctagtaatgtcatgtgttcgtgctgcaaggggcgcggagtattaaggaataagaagcggatcgttaaacatcctgggtgtggagagaaaactcctgcaaagacggctgtggaggtaacggaatcactatgcactaaatgcaatggtgcaggtgttgtatctacatcttgcgttaaatgccgtgggcgtggcgtagcgctggacaggaagaaatcagaactacagggcgctccagtttattcatcctgcaagcagtgctcagggcgtgggtatgagcgcatacctgcggcctcatgctttcgtgcgatatgtcagttcaccgctgcaatttcaccaggcgtatgggataaggctattaagccattctatgagtcattaattagcaaggttgaaatggaggagtctgctgcaaatgtagttttatcgaaagttaccagctaagttttattccgataacgattgtatcttgcaaaatgacgaaaagtagaatatcataaccctaacagtagaaatccgtgctttgttaaggtggatttaaaaaaaaggccctgcaatgatgcggggctttttgcgttttaagaacgacatttctgaaagcgccctatcaccaatcaccagaacatatccagatacccttgctcattcgtggcgactgggtagggcgttttacacaaaagaaaacccagcactatggctgggcttcgtgaggatgggggcaagaggttgcgctaacaacctcctgccgttttgcccgtgcatatcggtcacgaacaaatctgattactaaacacagtagcctggatttgttctatcagtaatcgaccttattcctaattaaatagagcaaatcccctcaatgaaggggtagagcatgtaccgtatggacaaaatcagagaatggttcagttacagcttcggaggactgactgcgatgggtggcattctctccctgaatgactgggctgtcatcattggtattctttgtactgtcggcacatttggcatcaactggtactacaaacgcaaagagcgtgaggacagattgaatggcaatgtcaccggcactacgaaatagcgtaatggcggcgataagtggcggggctattgctatagcatctgtgttaatcactggccccggtggtaacgatggtctggaaggtgtcagatacaaaccatataaggacgtagtcggtgtgttgactgtgtgttatggccacaccggaaaagacatcatgcctggtaaaacgtataccgaagcagaatgcaaagccctcctgaataaagaccttatcactgtcgccagacaaattaacccgtacatcaaagtagatataccggaaacaacgcgcggcgctctttactcgttcgtttacaatgtgggcgcaggcaatttcagaacatcgacgcttcttcgcaaaatcaatcagggtgatatcaaaggtgcatgtgatcagctacgtcgctggacatacgctggcggtaagcaatggaaaggcctgatgactcgtcgtgaggttgagcgtgatgtctgtttgtggggtaagcaatgagcagattaacctcgattatctccgctctggttatctgcatcatcgtctgcctgtcatgggctgttaatcattatcgtgataacgccatcacctacaaagtccagcgcgacactgttactcaaaagctggcgctggcgaacgcgacaattaccgatatgcaaacgcgccagcgtgatgtagcagaacttgacgccagatacacaaaggagcttgctgatgcgaaagctgagaatgatgctcttcggcgcaagcttgataatggtggtcgggtgctcgtcaaaggaaaatgccctgtgtcatcctcagccgaaacctccagcgcctccggcatgggcaatgatgccaccgtcgaactctctccagttgctggacgaaacgttctcggtatccgggacggaatcatcagcgaccaagcagcactgagaacgcttcaggagtacatcaggacgcaatgcctgaaataatttccatcacatagaaatttgacaagtgactttcatgaaaatgcctcgtaatgccgggcttttttgtatccgcagtaaatgcgcttcacacgcgcgacttctgaacacagaacctttcaggatgacccttgaggatgccggtttggtgatcggtacctttctgtgggccggaatcctgtgtgacaaggttcatcacttaaaggtgatcactgatgaagtacccaacagttatggtcaatggtgtgtccgttcgtgttgatgaggacggacgctacaacttaaacgatctccatgcagcagcagttgcaaatggagaggctacagagcaacagcgcccaagcaagtttttgtgtagcgcgcagataaaacgcttcataaaagcactagaggccaaagtgcaaaaaagcactttgaaacaaattcaaccacttaaaatcattaaaggtggtaccgaacctggtgtgtggggcgttgaactactggcaatcagatatgcagcatggattaagccggaatttgaaatcgaggtttatgaagtttttaaaacgattgtccgtctcggcgttggtgccatgtctcgcctgaacaaaattgaccacatcatcagcactgaaaccaaagcgataagccagtgtgcaagtcaaatggctaagtggggcgttggtgggcgaacaagattgcttcatgttgcacgtgagagagcagcaaatgaagtgcaaatgtatttgcccggaatggtgtgattctgctggttaatccagtttgtacattacggcagtaccgcgaaacaacccaagccagtaagtggggaaataacactggcagccactgaaagatgaacctccagccttatggcaaaaaagattctttgtggtggcggactgatggaaagacatcggttattgcagaggccattcaatgagtggtctagacaatggcttatcccaacaaccggagccaacacaatggcagagattacagcattgacagaattacagcagatgaacctcgatatcctccgtttagttcaaagcgataccgcagcagcagagaaagcgatcgcattcgttgctggaagtaagctgaacttcgaactgttcaaagaccaactggttttggcgcagggtgaaggaacggcattagctcgcgcagaaaaggctattcgtgaggcaaaagaagcgttagacctgttcactgccggagcataacgaatggcaaagacgaagtggcctaaacttccccggttcttcgtgccattgttccatagcgccaatgtctacctgtgtcgttcaaaggaagagtgggatcaggcttgcattcatcttggagttggtagcggcgggaatgagatgctggcgggggcaacacagtcatattgcaataccgaaacaggcgagaatctttacctgcttggtgtattcaatggtgaggcggccacattggttcatgaatgcgctcacgttgcattttatgtctgccgagatgttggtgtaaccacttatcctggcgacgcaaacgaaacctactgctacatgcttgacagaatgttcagtcacttcctgccgttctttcatgaaccagaaaaagaaggagccaagtaatggcaaacccaaacttcacgccatcatggcctctatacaaagatgctgacggtgtatatgtgtctgcgcttccgattaaagctatcaaatacgctaatgacggaagtgcaaacgcagaattcgacggcccgtatgctgaccagtacatgtcagcgcaaacagtagccgtattcaagccggaggttggcggatatctgttccggagccagtacggcgagctgctctatatgagcaagacagcatttgaagctaactacacttctgcaagcggttcagtagctaatgcagagacggcggataagttatctactgcccgcactatcacactaaccggagcggtcacaggttcagcgtcctttgatggttcggctaacgtgactatcgaaacaacatcaggaagttaacttatggcagcaccaaagggcaaccgattctgggaggcccgcagtagccatgggcgtaacccgaaattcgagtcgcctgaggcgctgtgggctgcttgttgtgaatacttcgagtgggtggaggctaacccactatgggagatgaaggctttctcatatcaaggagaagttacacaagagcctattgccaagatgagggcgatgaccatcactgggctaacgctattcctcgatgtgacgcttgagacatggcgacaatacagggtgagagaagacttatctgaggtcgttacgcgagcagagcaaatcatctacgaccagaaattctccggcgcagccgctgatcttctcaacgctaacatcatcgcccgcgatttgggcctcaaagagcagtcgcaatttgaagacgtgacacctgataagggagatcgcgataagcgccgctctcgtatcaaggagctattcaaccgtggaactggacgcgattcttgataacctgagcgacgaagagcaaatcgaattgctcgagctactcgaagaagaagagaactaccgaaatacacacttgctatatgagtttacgccatacagcaaacagcgtgagttcatcgacgcaggtcatgattatccagagcgatgttttatggctggtaaccagcttggtaagtcatttactggcgctgctgaagtcgcgtttcaccttaccgggcgatacccgggaacgaaaggttatccggctgatggtaaatatggcggagagtggaaaggtaagcgtttctatgagccagttgtcttctgggttggcggtgaaacaaacgagactgtaaccaaaacgactcaacgcatcctgtgcgggcgtatcgaagagaatgatgaacctggctatgggtcaatcccgaaagaggacatcattagctggaagaagtctccgttcttccctaatcttgttgatcaccttcttgttaagcaccacacgccagaaggcgtcgaagatggcatctcaatatgctactttaagccttactcacagggccgcgcccgctggcagggcgacacaattcacggcgtctggtttgacgaagagccgccatatagcatctatggcgaaggtcttacccgtacaaacaaatacgggcaattctcaattctgacgtttaccccgctgatggggatgtctgacgttgttaccaagttcctgaagaatcccagtaagtcgcagaaagtggtcaacatgaccatctatgatgctgagcactacaccgacgagcagaaagagcaaatcatagcatcctatcctgagcatgagagagaggcacgtgctcgtggtattcctacgatgggtagcggtcgaatattccagataccggaagagacgattaagtgccagccgtttgagtgtcccgatcacttctatgttatcgacgctcaggacttcggctggaaccacccgcaagctcacattcagctttggtgggacaaagacgcagatgttttctatctggcgcgtgtatggaagaaatcagagaacactgccgttcaggcatggggtgctgttaagtcgtgggctaacaaaatacctgtcgcgtggcctcatgacggtcaccaacacgaaaagggcggtggtgagcaacttaaaacccaatatgcggatgccgggttctctatgcttcccgatcacgcaacgttcccggatggcggtaactcagtagagtcaggcattagtgaacttcgtgacctgatgcttgaaggaagattcaaagcattcaatacatgcgaaccattttttgaagagttccgcctatatcatcgcgatgagaacggcaagattgtcaagaccaacgatgatgtgctcgatgctactcgctacggctacatgatgcgccgcttcgccaggatgatgcgcgatatcagaaagccgaaagaaaagaaaatccccgcaccgattagaccagtacgcagaggacgataatggccgacaatgaaaacaggctggagagtatcctgtcgcgctttgatgcggactggacagccagcgatgaagccagaagggaggccaagaatgatctcttcttctcccgcgtatctcagtgggatgactggctatcacaatacacaaccctgcagtatcgcgggcagttcgatgttgtacgtccagtggtgcgcaagctcgtttctgagatgcgtcagaaccctattgatgttctgtatcgtccaaaggatggagcaagtcctgacgccgctgatgtgctgatgggcatgtatcgcaccgacatgcggcacaatacggcgaaaattgctgtcaacatagccgttcgtgagcagattgaagcaggcgtgggtgcgtggcgtctggtcactgattacgaagaccaaagcccgacgagtaacaatcaggttattcgtcgagagcctatccatagtgcctgctcccatgttatctgggacagcaacagcaaactgatggacaagtctgacgcccgtcactgcacagttatccactcaatgagccagaatggctgggatgatttcgcagaaaaatacgacctcgatgctgataatattccatcattccagaaccccaacgattgggtatttccatggctgacgcaggacacaattcagatcgctgagttttacgaagtggtcgagaagaaagagacggcgtttatctaccaagacccggttacgggtgagccggtaagctactttaagcgcgatattaaagacgtcatcgacgacctggctgatagtggatttatcaaaattgcagagcgccagattaagcgtcgccgggtatacaaatctattatcacctgcaccgcagtactgaaagataagcaactcattgctggagaacatatccccattgttccggtattcggagagtggggcttcgttgaagataaagaagtgtatgagggggtcgtccgcctgacaaaagacggtcagcgtctgcgcaacatgattatgtcgttcaacgccgacatcgtggcccgcaccccaaagaagaagcctttcttctggcctgagcagattgcaggctttgagcatatgtatgacggtaacgacgattacccatactacctgctcaatcgcacggatgagaacaacggagaaatgccaactcagccgctggcatattacgaaaacccggaggtcccgcaagccaacgcctacatgctggaagcagccaccgcggcagtgaaagaggtcgcgacgctaggtgttgatgcagaggcggtaaacggtggacaggtagcctacgacactgttaaccagctaaacatgcgcgctgaccttgagacatacgtgtttcaggataatctggctaccgctatgcgccgtgacggtgagatttaccagtcgatagttaatgacatctacgatgttcctcgcaacgtgacaatcacccttgaggatggtagtgagaaagaggttcagctaatggctgaggttgttgaccttgccactggtgaacggcaggtactgaacgatatcagggggcgctatgagtgctacacggatgttggaccatcattccagtccatgaagcagcaaaaccgctcagaaattcttgagttgctcggcaagacgccgcagggaacgccagaatatcaactgctgttgcttcagtacttcacactgcttgatggcaaaggcgttgagatgatgcgcgattatgccaataagcagcttattcagatgggcgttaagaagccagaaacgcctgaagagcagcaatggttagtagaggcgcaacaagccaaacaaggtcaacaagacccggcaatggttcaggctcagggcgtactcctgcaggggcaggctgaactggctaaagctcagaaccagacgctgtccctgcaaatcgatgcagctaaagtcgaagcgcagaaccagcttaacgctgccagaatcgcagaaatcttcaacaacatggacctcagtaaacaatctgagtttagagagttccttaaaaccgttgcttcattccagcaggaccgcagcgaagacgctcgcgcaaatgctgagttactccttaaaggcaatgaacagacgcacaagcagcgaatggacattgccaacatcctgcaatcgcagagacaaaatcaaccttccggcagtgtagccgagacacctcaataagagagagttaatcatggaaccaaccaccgaaattcaggcaactgaagacttaaccctgtccggcgatcatgcagcggcatctgctgatagcttagttgtcgataatgccaacgacaatgcaggtcaggaagagggctttgagattgtcctgaagtacgatgagacagcaccaaaacaagacccggcaaagaacgcagaattcgcccgccgccgcatcgagcgcaaacgacagcgcgagcttgagcagcagatggaagcagttaaatgcggagaattgccggagagtttacgggtaaaccctgaccttccacctcagccggatattaatgcctatctgtcagaagaaggcctggccaaatatgactatgacaacagccgtgcgcttgccgctttcaatgctgctaataccgaatggctaatgaaagcgcaggacgcccgcagcaatgccgtagcagaacagggccgcaagactcaggagtttacccagaaatcagcgcaatacgtcgaagctgcccgcaaacactatgacgcggcggaaaagctcaatatccctgactatcaggagaaagaagacgcatttatgcaactggttccgcctgcggttggggccgacattatgcgcctgttcccggagaagtccgccgcgctcatgtatcacctgggtgcaaacccggagaaagcccgccagttactggcgatggatgggcagtccgcgctgattgaactcactcgactatccgaacgcttaactctcaagcctcgcggtaaacaaatctcttccgctccccctgctgaccagccgattaccggtgatgtcagcgcagcaaataaagatgccattcgtaaacagatggatgcagctgcgagcaagggagatgtggaaacctaccgcaagctaaaggcaaaacttaaaggaatccgataatggctttgaacgaaggtcaaattgttacactggcggtggatgagattattgaaaccatctccgcaatcactccaatggcgcagaaagccaagaaatacaccccgcctgctgcttccatgcagcgctccagcaataccatctggatgcctgtagagcaggagtcccccactcaggagggttgggatttaactgataaagcgacagggttactggagcttaacgtcgcggtaaacatgggagagccagataacgacttcttccagttacgcgccgatgatttgcgtgatgagacagcgtatcgtcaccgaatccagtccgcagcccgcaaactggctaacaacgttgagctgaaagtcgcaaacatggccgccgagatggggtcattggttatcacttcgccggacgctatcggcactaacaccgcagacgcatggaactttgtggccgatgcagaagaactgatgttctcccgcgaacttaaccgcgacatggggacatcgtacttcttcaacccacaggactacaaaaaggcgggttatgacctgactaagcgcgatatcttcgggcgcattcctgaagaagcgtaccgcgatggcactatccagcgtcaggttgctggcttcgatgatgtcctgcgctctccgaaacttcctgtgctgaccaaatctactgcaactggcatcactgtatccggtgcgcagtccttcaagcctgtcgcatggcaactggataacgatggcaacaaagttaacgttgataaccgttttgctaccgtcaccctgtctgcaactaccggcctgaaacgcggcgacaaaatttcgtttactggcgtgaagttccttggtcagatggctaagaacgtactggcgcaggacgcgactttctccgtagttcgcgttgttgatggtactcacgttgaaatcacgccgaagcctgtagcactggatgatgtttctctttctcctgagcaacgcgcctacgctaacgttaacacctcactggctgatgcaatggcggtgaacatcctgaacgttaaggatgcccgtaccaacgtgttctgggctgatgacgccatccgtattgtgtctcagccgattcctgctaaccacgaattgtttgcaggtatgaaaactacctcattcagcatcccggatgtcggccttaacggtatcttcgctacgcagggtgatatttccaccctgtccggcctgtgccgtattgcgctgtggtacggcgtaaacgcgacacgaccggaagcaatcggtgttggcctgcctggtcagactgcgtaactaacaggggcttcggcccctttcttatttgaggtgacacatgggtgtaatgctatataagcagggtcgtggaacgaaggtatggggcaaggacgttcaggttaaagttgtcgatgacggcgacgtagaagatcaccttgccgatggttgggttaggcatccaaatgaggttccggagactaatgacgagccaatcggtgattcaggcgtggtcaagaaagacatgggtgaagtatctgatggataccacacctttaacgaactatatgcacatcgagtgcgcctgttttcaacactaatgaatgccttccgcgaaagcgcatggtggagctttcagcatcatgacggcgagcaatgggatggatgggtgttagctggcatcgacaccccagaaggcgcggtaacataccacctcccagagagtgaaattgaacatctgcctaaaggcacggaaattgagtttggcaaggaatgggacggccacacggcagatgatgtgttgaatcgtctgctaagcctgcgaccgaaagaaccggcaaccaaagaacgcaaaaagccaggaccaaagcctaaggcggaaagcgatgcagataaagactaaaggcgatctggtcagggcggcgctgcgtaagcttggtgtagcatcagatgcaactctcactgatgttgagccacagtctatgcaggatgccgtagatgaccttgaagcgatgatggctgagtggtatcaggacgggaaaggcattgttaccgggtatgtattctcagatgatgataacccgccatccgaaggtgacgaccacggtcttcgctcaagcgcaatcagcgcagtattccacaatctggcttgcagaattgctccggattatgcgcttgaggctaccgccaaaattatcgcaaccgctaaatatgggaaggagcttctctataagcagaccgccatcgccagagccaaaagagctccttacccgtcacgcatgccaacaggcagcggtaatagtttcgccaatctgaacgaatggcattatttccccggagagcagaatgccgattcaacaactccccatgatgaagggaatgggtaaagacttcaagaatgccgactacattgattacctaccaatcaatatgttggccacaccgaaagaagtactcaactcatcgggttatttacgctcattcccgggcatagcgaagcgcaacgatgtaaatggagtatcgcgcggagttgagtataacaccgctcagaacgctgtatatcgtgtttgtggcggcaagctctacaaaggtgaagccgtagtcggtgatgttgccggaagcggtcgcgtatcaatggcacatggtcgcacatcacaggcggtaggcgttaatggtcagctcatcgagtatcgctatgatggcgcggttaaaaccgtctcaaactggcctgcagacagcggattcacgcagtatgagttaggctcagtccgtgacattactcgcttacgtgggcgttatgcatggtcaaaagacggtacagattcatggtttatcactgaccttgaagatgaatcgcatcctgaccgctacagtgcagaatatcgcgcagaatcgcagcctgacgggataattggcataggttcatggcgagatttcatcgtctgctttggctcgtcgacgatagagtatttctccctgacaggcgcaaccaccgttggcgctgcgttgtatgtcgcgcagccatcgttaatggtacagaaggggattgccggaacatactgtaaaacgccattcgctgattcatatgcattcatcagtcacccggctactggcgcaccttccgtctacatcatcgggtcagggcaggcttcaccaattgcgacggccagtattgagaagattatccgctcatacacagctgaagaactggcgactggtgtaatggagactttgcgcttcgattctcatgagcttctgattattcatctccctcgtcatgttctggtttacgacgcatcgtcaagtcagaacggaccgcaatggtgtgtgctgaaaacagggctttacgatgatgtatatcgtgctgtcgacttcatgtatgaaggcaaccagataacgtgcggcgataaatcagaagcgttgacaggacaattgcaattcgacatcagcagccaatacggactacagcaagaacacctgttgtttacccccctcttcaaagcggacaatgccagatgcttcgacctcgaagttgaatcatccactggtgttgctcaatatgctgaccgcctgtttctgtctgcaaccacggacggaatcaattacggtcgcgaacagatgattgaacaaaatgagccgtttgtgtacgacaagcgtgttatctggaaacgtgttgggcgcattcgtcgattaatcggattcaaactgcgggtaatcaccaaatcaccagtaacactatccgggtgtcaaattcgtctggagtaacatatggcagacccgtcacttaataagcctgtcattattcaggccactcgtcttgatgcctcaatcctcccccgcaacgtcttcagccagtcttatctgctctacgtaatcgcgcagggggctgacgttggcgctattgcgggaaaggcaaacgaagcagggcaaggtgcctatgacgcgcaggtaaagaacgatgagcaggatgttgagcttgcagaccacgaagcgaaaattcagcagttacgcatcgacgtagacgaccatgaaatccgtattactgcaaataccaatgcaattgcggcgctggatgtcagactaaccacggctgaaggagaaatagtcaccttgcaggctgatgtcagtgctcttgatggtagagtgacgacggctgaaggaaatatttctgcattgcaggttgattacgtatcgaaaacagctaccgcaacacaatcgctggcgtcacctctcaacgtgacaacgtcctattcagttggcggtactaaagttatcggtgctcgacagaccggatggacagcagcaacaggcgctgcgcttctcggtgcattcaacgctaaccaggcatacacggtcagtgccacatatacgcagtctgaggtatcagctctggctaccggattgcagcaggcgcgacagcgtatcaaagctctcgaagatgcaatacgaactcatggattaatcaactgatgattacattcattccaacacgcaacatcgacctgatagaaacggtcggcaatcatcccgacatcatcgccgggagtaacaacggtgacggatacgactacaaacctgagtgccgctatttcgaagtgaacgtacatggtcagttcggtggcatcgtgtattacaacgagattcagccgctgacctttgactgccacgccatgtacctgcctgagattcgcggattcagtaaggaaatcgggctgacgttctggcgatatattcttaccaataccaccgttcagtgcgttacatcatttgctgcacgcaaatttcgccacggtcagatgtactgcgcaatgattggtcttaagcgtgtaggaaccatcaagaaatacttcaaaggcgtggatgacgtgacgttttacagcgccacacgcgaagaactaatcgacttcctgaatcacgggagataaacatgttatatgcatttacgctgggcagaaaactgcgcggtgaggaaccttattatcctgaaaaaggcggaaaaggtggcgcagataaaagcgcaaagtatgcagcagaagcgcaaaagtatgccgcagacctgcaaaaccagcagttcaacaccatcatgaacaacctgaagccgtttactcctctggcagataagtatatcggcagtcttgaaggtttatcgtctctcgaaggtcaggggcaggcgcttaataattactataactcccaacaataccaggactttgtggggcaggctcgctatcagaatctggcagcggcagaagcaacaggtggccttggttctacagcgaccagtaaccagcttgcagcaatcgccccaacacttggtcagcaatggctgtcaggtcagatgaataactatcagaaccttgcaaatattggtcttggtgcgcttcaggggcaggcaaacgccggacagacatatgccaacaatatgagccagatttcacagcaaagcgcggctcttgcagcggcaaatgccaacagaccatcagcaatgcaatctgctattggcggaggtgcgtctggtgctattgctggggctggacttgcgaaattaattggttcatcaactccgtggggggctgcgatcggcggcggtcttggtctgcttggctcgttgttttaaggggtaatcaatggctacgtggcaacagggtattaattctggtggttttctggctggcattggtgcgcaaaatgagaacgcgccaaaggcaagcgacattaacgcaacgcttggactgattcgcgaaaacaatgagttggcccgttcaggcgctaataatgtggctttaacagggctgcgtggtctggctggagttgctgatatttataaccaggaacagcaacagaaagcgctaaacgcattcaatcaggttcatgccaacgcatgggctactggcgacaattcaggactcatcaagttcgcgcaggaaaacccggcgtttgttgcacaggcacaacaggcgttttccggtcttaatgagcagcagcgtaacgatatgggcgatttagccatgaaggctaacgtcgctctttctcaggggccggaagcctacagtaaattcattactgataacaaggacaggttaaaccgtgttggcgctaatccagactggatgatccagactggagtacagaatccagaacagctatcacacatgttgactacgatgtctctcggtgcgcttgggacagaaaaggcgtttgctgttcaggataagatggttggtcgccaacttgaaggagaaagaaaccagttaaccgcaagagggcaggatattagtgccgctaccgctcgaagggggcaggatattagtacccaaaactcgctacgttctgcgggcggggcggttccggcatcagtccgtgaatatcagtatttcaatagtttgtcgccagaacaacaaaaaaattatcttcgtgttcgtggcaggccggatgcaggtggggaaaatgttgtgcaattagcagacgggcgtactgttaatgtcaatggcaagctgcatggatctggcgctagtgcattttacgaaggtactgacgataacggaaatatggttcgtgtcccggcaagtgctattgcagcacctccaacgtctgcggcaagcgcacagaactacgcgatgaagaaagatatcgatgcaatcgcaaacgcagatgcttctgctctcgatttcatgactggaatgactggcggagcaggaaatccggcaattggtgcagatgttcgcagccgactcacaggcaaagaacaacgacagttatataactccgcacaacgtattcagggaagaatgcagaatcagggcgtggcagcagcaagagatatgggtgctagcggtatcaacaccattgcagaagcaaagatgtattttcagggtatgccgcaggttgactactcaagcccggaggctatgcagcagtcgattcgtgagattcaggaatacaccaacaattataacaagcagtacaacgttaatgttggtaaatcgcagtatcagcaatctcaacctgtacaggaatcacagcctgcatccaacagcaacttttcttcactatggggtgattaatggctaaggcatggaaagacgttattgcctctcaaaagtaccaggcattagcaccagagcagaaagcacaggcgcaggagcaatacttcaatgaagtagtagcaccgcaagccggaaacgatgccgaacaggctaaacaggctttctatgctgcttatccacctccaacggctcaacaaccagcaaaacaaccacatggaccggcgcagccacagcaacaaggtggcttcatgtctgaccttagcaatgctgctgcggagacggggcgtggattgcttcaggctggcgttaatctggcaaatatcccggcatcaatggctgatgcagtcgccagcgccggggcatgggctggtcagaagcttggcattggtgacggaacttatcagccatcgcctcgcgtcacgacacaaggacttgagcaggactttggcttgcaacaaggtgcgcttactccacagacgacagaaggcaaaatcttctctgaagcactgccatatttgactcctgttggggccgagagaattgcagcgcaggcatcatctattgccggtcgagttgctcagggtgcatcacgcttgttggcggagaacgctgttggttcattggctgcaaacagtgagcgtgataatccaggagcactggcaacagacttaggaactggtgttgcattaggcggggcaataaatcagttaggccgtgccgctggtgctgcttatcgtgggattcgcgggacgatcgcaccagaagcgcagcaggctattcagttcgctaatgctgctgatgttcctttgcatacaactgacgttttgcagccaaattcccgcgtcgggcgcatggcacagaccaccgctgaaaacatcccatttgctggaacaagcactatgcgagctaatcagcaagaagcgcgcagccagttggtagatgaatttgcatcacggtttggtgagtatgatccgtcaattgttattggcagcctgaaggcaaaaacatcaggaattcggaaagcagcagggaaccgtcttgagcaagttcagagcgcaatgacaggagtcaacattcagccaacgcgagcaattcagcagatagatgatgagattggaaaactgcaaaaattaggacaagttgccgacacggatacaattagcaaacttcaggcatacaggaatgaattggctaaaggtgatgttaacctggaacagttaagcagactgagaacgcagtttaggatggatgtcagaggagaaaggacacaaatgccaccgccagctgaggcggcagtgcagcgtgtatacagggcaatgacaggagacattgataactccattggccagaaccttggaaacgacactctgcgcagatacaagcaggccaatgcggtatacgcagatgaggctagtaagctccagaatacccgcttgaagaacgttctgatgaaaggggatctaactcctgaagttgtcaacaacatgttgttcagcaagaataaatcagaagttcagaatctgtaccggtcagtcggtcaggtgggacgcgctcagatgcgtaacggcatcatcggaaaggctatggagaaatcaggcggttctccggatcagttcctgcgccaggttaatttaatgtctacccagacgggaatcgcttttaaaggacgagatgctgcgtatctgaaaggactgaagaactatcttgagtcaaccaagcgtgctggtcaggcaggagtaacaacgcctacaggtcagcaaactataccgttcatcctaggtattggaacggtaactacccctgcgctggtaggtgttggtggcgggtatggtttgctggcaagaatgtatgagagtgaaccagcacgtaatgcaatgcttcgcctggctaatactccacgtggttctaccgcattcgagaaagcgttagccgaagttgagcgggctgttaactctgttgctcaaggtgctaaatcagatgcattaagcgaatagcagtctaccaactacgatgccgaagataaggaatgcaaagttcaataagtctctgttcataaatcctcgtaggaaccaatagagatcattctttgatctatatattatctgaatcccttacttaattgggtgatgataatgaaaaaaggtgtgatggttggctgtttttgtgtatttctcgctgggtgcgctacagcaacaaaaacgtatgctccagatggaagagaggcatataccatagaatgctctggagtaggtggttcatgggctatgtgtcaggccaaggccggagatctttgtggttcaaaaggctatgacctgattagcactggtagtgatcagggagctattgcaaacattgacggaagtactggcaacgcatttgcaacaaacaccatatcaagaagcatgtatatagcttgcaaaaaatgagtaaagcccggttcgccgggctatttttttcgatagaaatctttcaacttttcgaatactaattcttgaatttctctggatacgatgtctgcttcgcgttcagcatcatccctgtatccgattacaggcgtaggcttttcaagtgaatcagccactatctgcactagctctgcatttagtgaccttccgtttgcctttgccctctgcttaaccttttctttcagctcgtagggtagcctgaggttaaattgcgggtcatctcttcccatttctgatgcctcacttttgtaagtggatcagcatcatatgatctactggttgtatccacaataagaccaccgtggtcttaatgacgcattgccgtagccacgctgcgacgattactttcatctggagcacattaaatgacagatatcactgcaaacgtagttgtttctaaccctcgtcccgtcttcactgaatcccgttcgtttaaagctgttgcgaatgggaaaatttacattggtcagattgataccgatcctgttaatcctgccaatcagatacccgtatacattgaaaatgaggatggctctcacgtccagattgctcagccgctaattatcaacgcagccggtaaaatcgtatacaacggccaactggtgaaaattgtcaccgttcagggtcatagcatggctatctatgatgccaatggttctcaggttgactatattgctaacgtattgaagtacgatccagatcaatattcaatagaagctgataaaaaatttaagtattcagtaaaattatcagattatccaacattgcaggatgcagcatctgctgcggttgatggccttcttatcgatgttgattatcatttttataatggagagaaagttgattttggtggtaaggttctgactatagaatgtaaagctaagtttataggagatggaaatcttatttttacgaaattaggcaaaggttcccgcattgccggggtttttatggaaagcactacaacaccatgggttatcaagccttggacggatgacaatcagtggctaacggatgccgcagcggtcgttgccactttaaaacaatcgaaaaccgatgggtatcagccaaccgtaagcgattacgttaaattcccaggaatagaaacgttactcccacctaatgcaaaagggcaaaacataacgtctacgttagaaattagagaatgtataggggtcgaagttcatcgggctagcggtctaatggctggttttttgtttagagggtgtcacttctgcaagatggtagacgccaataatccaagcggaggtaaagatggcattataaccttcgaaaaccttagcggcgattggggtaagggtaactatgtcattggcggacgaaccagctatggatcagtaagtagcgcccaatttttacgtaataatggtggctttgaacgtgatggtggagttattgggtttacttcatatcgcgctggggagagtggtgttaaaacttggcaaggtactgtgggctcgacaacctctcgcaactataatctgcaattccgcgactcggtcgttatttaccccgtatgggacggattcgatttaggtgctgacactgacatgaatccggagttggacaggcctggggactaccctataacccaatacccactgcatcagttacccctaaatcacctgattgataatcttctggttcgcggggcgttaggtgtaggttttggtatggatggtaagggcatgtatgtgtctaatattaccgtagaagattgcgctggctctggcgcgtacctactcacccatgaatcagtatttaccaatatagccataattgataccaatactaaggatttccaggctaatcagatttatatatctggggcttgccgtgtgaacggtttacgtttaattgggatccgctcaaccgatgggcagggtctaaccatagacgcccctaactctaccgtaagcggtatcaccgggatggtagacccctctagaattaatgttgctaatttggcagaagaagggttaggtaatatccgcgctaatagtttcggctatgatagcgcagcgattaaactgcggattcataagttatcaaagaccttagatagcggagcattgtactcccacattaacggggggcccggttctggctcagcgtggactcaacttactgctatttcaggtaacacacctgacgctgtatcattaaaagttaaccacaaagattgcaggggggcagagataccatttgtccctgacatcgcgtcagatgattttataaaggattcctcatgttttttgccatattgggaaaataattctacttctttaaaggctttagtgaaaaaacccaatggagaattagttagattaaccttagcaacactttagatatgtaataaaaatgggtgtaaacacccatttttattttatggtaaatgttctatagctaattaaacctaacaactatggtttcccctacaacaccaatatcgtatacgttattaccagattttttccacccattttcaagtttcacctctttgtcatatagtctgtaatttctggagaacacatttctttgcattaacacctctgaccacatccaattattgttaataatgcgtggtattaactctctcattaaaggatgctttattactatgttttcatttattgatgcatacggttctgtgccaatgaattttatatttttcttgtctcttccaaatccaagatgatctatgtcttgagatattctatttacaatgctttcctcaagctgaaactgtgcatttatggcattgtaagcaccataagaaaatattgttgatattaaaagaataaaagaaaaatatattcttgatattaactgcttatcttcaaaagcatagaatacgcataggcaacaaaaaaacataaagccacccataccaatcaataccctcggtgcgtatattggtgattttagaaaaatcattggtccaatgatgaaaaacattgatgccaataaaattaaaactactagcaagaactttgttttcttattttcatctcttttgattacttttaaaactatgactatcaaagaaatgattagcgcaaagaatagcgagtagtagattaagtaattatcgccattcaagatcgtgctaaacattctataaaatgataagacgttagaaattatcccttcaaataaacttgagtttatctctataatcttactatgttcgatattgtaagaacctgttacaagtctttttgcaataaagtaagaataggcaaaatatcctactattaaaccagcgacagaagatgctgtattttttgtgatatttgaaattgagtttttcttaaccacatctgaaattataaaggccaacaagaatattgcgtaagtattcagcgcagcctgataaagactaaggaatgcaatggttaaaatggatgatattatgatatttataggcttgtattgataagcgacatacgatgagataatagatattgccacactcatgcacattgttaatgaatcatatctatatgatagattttcaataaagaatgggtttgccaaaatcatcataaaacaaagagatgctgtgatgtagtcatctccaaacagcttttccctgatgcaggatagtgccaatgctaaaataactatccctagcattaaaggtagcggagaagcatctataattggggttccaaaattaatgatatagaaaataaagtcggaaagtgggcgaccattgcctgaccaacccaacccgccatataaagacctacccaagtcatcaacgaaaaatgattgatgtgtcaataaaggaaatgtatatataatcgccaatccaagaaagattgatataaatatcctgtcattactattaaatttcacttttaaaacccttacgctttaatatgtatttaggccgctgtttggtttctatgtaaattctaccaatatattctccaagaatacctattcctatcaattgaacgccacccaggaaaagaacagaaacaagaagagacgggtagccaggaacattatttccaaatattaatttatcaataatcatccatgcaccgtaaaggaatgacatacctgcaataaacaatccaatgtaagtccatatgcggagcggaaatgttgagaaagaagttattccctccagcgccaggttccataatttccagccgttgaatttcgaatcaccggccacgcgttcggcacgggcatatttaacaacatccgtttttccgccaacccaactgagcacacccttcataaacaagttgcgttctggcatttgtttgatgttctcgacaaccgcacggctcattaaccgaaagtcgccaacattttcttcgatttttggattgctgattttattgtgcagcttataaaaccactcagctgtcttacgcttcaacctcccatcagttgagcggtctgagcgcttagccagcaccatatccgcgccagcctgccacttctcaatgagatgagggataacttctatcggatcctgtaaatcgacatcaataggaatgaccgcatctccggttgcatggtcgagacccgcgaaaagagcaggttctttaccgaagtttcgcgtaaacgaaagcggaataacgagcggatcagatgcggctattttgttaattattgattcagtcgcatctttactaccatcattaataaaaacgatctcaatttcatattcttttagctcattaaactcacgtaccgttttatagaaaatcggtatcgtgtcttcttcgttaaaaactggaacgacaagagagattttcatcttatatccctgaaaacaatgaatctggaatagataaagccgcataccaggctaattgccgagaaagtgataagggtaatcaatggtggcaaggaacattggtcagccatccagccaacaacagcgctcagtgttcccatgaatcccacatacatcatgtagcgaagcgtggtggtggtggcattaaaggtgaaacgcgcattggcatagaagctgaacgatacggcgataacaaaaccggaaaagttcgccagcgcctgatgcgtatgcatcccatacacacaaaaagcaaatacgccccaatgaataagcgtgttaagaacaccgatcgatgtgtacttagcgaataacttcaacattatgaaaatcagcggattcggaaaggtctggagtgtagcactacaaattactttgatcgatataaacgatcaataatgtaaactttgatagtttaaagttattgtttgctcgttaattgatcgttgttaccgatcaatttttattgctgattgctaagtggtttgggacaaaaacgggacacacaaagctttgcatcggcttgcaaggctttgcatgtttttcgaagatgggacgtgtgagcgcaggtatgacgcggtatgttgttgacttaaaaggtagttcttataattcgtaatgcgaaggtcgtaggttcgactcctattatcggcaccagttaaatcaaatacttacgtattattcgtgccttccttatttttactgtgggacatatttgggacagaagtaccaaaaatcgagtcaatttgtcgagcatgttcagtcaggtgatttggtgccagatgagcatatctgcgaaccatttcgatagactcccagccacccatttcctgcaataccgaaatcggaacgccagcctgaactaaccagcttgcccacgtgtgcctcaggtcatgaaaacggaagtcttcaatgcctgctcgttttaatgctgacctccatgcagtattagcgtcatagcgcatcttcctcactacaggtgatttagttccgtctggcttggtgctgctttccttgtagacgaacacccatttgtgatgattgcctatttgctttttcagcacccggcaagcagtatcattcagcgccacgccaatggcctgattggacttactttgttccgggtgtatccatgccacctttcgctgcatgtctatctgctgccaatccatattgataatgttagaccgccttaagccagtagaaagcgcaaactctacgactgactttagcggttccgggcattcatcaatcaacctttttgcctcgtgaggctcaagccagcggatacgcttatttttcggctgaggaactttgatgatcggagccttatccagcatcttccattcgcgttcagcagcccggaggagtgccttaatgaatgaaaggtgagttgcttttgtggctactgctgccggcttaggcttgaatactggaggctgcttcccattcttcctgcaagcttcatccattaacttccagttttcctcatgccgccgattagtcatcttctggatggcggagtaaatcttcgtctcggtaatatccttcaactgcatccctgcaaaatgctggagccagaatcctatccgactcttgtcatcatccagcgacttcttatgcgccttctcctctaaccacctgacacaggcctcctcaaaagtcatgtcaggcgtctctcctaatttatttaccctccatgcttctgccttcagtttgtcatgaagctctgtggcctgccttttgtcctttgtcccaagagactgcttaaatcttttgccgttcggcaatgtgaaactggcgtaccaggtttcacctctgcggaatagtgacatttcagttcctctgttatgtcatcacccgcgctcacctggacagtatgcagcggagattgaagtgccgcaacgcaggcttgtcgtgtggtgaggtaaggggatttaggtttggaagggtctttgcgtgttgcctgaaggcggcctgtgcgaatccagtttgtagcggtaggtctggatatcttgagaaatgcacaggcctcatcgagtgtgaggctgtgtgattccatagttactttcctaatactgaagcgagaagagcaatctctacaagaagctcaataaatccaaaaattgctatacctgcgtaaaccgcgccatcaatatccccgcggcgacaaagataggtggcactgatcacaagaatcatcattcactccataaaacaaaactcgccgtagcgagctcagataaaagaaatccccgcgagtgcgaggattgttattcattgccgatattcatctttatcgcgaacacctttaccggtttatcgccgaagtgcggatgtgtgattgtcttgatttcatatccgtcatacgggacgtcaattctgcggctggaatcgtcgcgcttcggatatccctttgtgataatcaggcggtcatactcccggaacataattcgcttattccagtagtcattacacaggcgatactcttccgttttctctccgcgaatcatggcatcgaagtattcacctttgacggcaagttgcaggttagccacgaccttcctcctttggcttgtgaatttgtatcgtcatgccgctttgagtggtgactacaacgacagaaccaggctgaaggctgttaagattgaatgcttcgtaaaacgaatccaatgccagtgcttttttattctttcggttccaccaacgccatcccttgctacaggctacactgacaatccactgtccactcctgtaagccatataaaaccagatgagcaaaacctgaaggaaggctatccagtcaataatcgtatatttcgcgaaggggtccatcacttcacctcctgcggtggctccggtagcggcatccagtgtgacggctcacataccccctcaacaccgttcatgtaaaagaattgaaataaccctttacctttgtgaaaccctaccatctgctcttttgtgtctgaacaataaaccaaaacatcttcttcgtttggcattcgctcactacagcttatccaaccatccggagttgccggatagctgcccgatagctcgttcaacttgtaagtttggcttacgggttcggcttccagttccgctatgcgcttttttgctgcttcaagctcaaagcgcagcttacctaccgtaagcgcaatatcctcgttctcctggtcgcggcgtttgatgtattgctggtttctttcccgttcatccagcagtgccagcacagtagccggattggctgcagcgatgaattcagcattggcctgctgttccatttggaaatcttcatcgaaaccgctttcaggatgcgctccttcaattctgcaaatgggaagatatccaacaacttcacgatgaattagcgcatcaccagcatcaaatctctcctctccatattcgagcgaccacacaccacacgttgctttctctgccttttcacgcagtgcctgatagtcaatcttgctcactggttgcctcctttgctcgctgattccactctgctctaacctctgaataaaaaatcgcgcagtcatttccaggcgccgcatatttgctaccagattgagcgcgacacgtaccgcatcgaacgaaatagaatcgaccgccagagccatattcagggtgatctgcttcgctggcaacgtgcgccgcgccgccacagaatggacatggtagtaggttggtcatgaatgcactcccttgcgaagttggtctgcacaatgcagcagggcgtccgtcgcttctttcaccgtaacgatgtcgccatcgtccagcccgacaaccgtagcgtccttaacgaacgccgagcaaaggtcattaaacgcctgcgcacgcacttcatccaggaaagcgtcggtggctggggtatcagtgaaatcgtccacccacgtatctccaacgtcctcgcactcgcgacgacaatattcgttgaattcgacctctgattttttcagtgccgcattctccgaagccagcgccgaaaacttctcgtgtgccaacttaacagccgaatcagcctgcttaattgactcaatcgctctctggtggtcttcggccagcgcggaaatcttggcctccgcttcagcaaatttacgcaccagatattcagcgtttgtttcgttaacctttaaatctcgtgggatgcatttacctttcagaaatccatccatctcaattagtgtcatttgtttcatttcttcccactccgccacatcgcattcagatatttgttttgattcactgatggaaaactctttctcgccagcatttcttcgcgtggaatatcgttgatgggcttgaagcggtgtcgaataatcatttccgatggaaggattccttggtcgtaggacaaacctctcatgatgaatccctcagttattgctgatagcgccgtaacgcgaacggtaatttttaaggcgcgggtctatttcaatgaatttggtgtaagtggcttttcggaatggtcggattgctgtttcgtttattcggtctttttcctgtttttctgcgagttgtatatcgcgtcggtacttccgttctgcttttgtttccggtggcagagcaagaaacgcgtcgagattgtttttgatattttccagcacctccgacttggagctaccggagcagttgcgcgggtcatccgcaccatatagaggtgcaggcataatttactccagggtaggttatccgaataatgtggtacgtatagggttatttctttcgtaaacgtgatagcctgctttttaccgactcttcacttcgcccgagaatttttgctacatttctttgtgtatagcctgatgagataagcgtctgcattcttttgtcttcgtcgtcgctccatcttggcttaacgaatgccgtttttaatgacagtttttttgctatgtaataaaactgatttatgtttaggcccagatgttctgctgcacggcaagctaccatgcgaccgcaaactgactccatctcagctggagttatgtttaatcttctcattaagccacctgtttaagctcatttattctgatattcattacctgaacgcattttgtctgcgcatcatcgtgaccagccaataattgccagtcatgctgatatctctcaattagctttttcttgtcagtttctgttgctgcataatcgctgaagtctttcaggatttgttcgcagtcaaccgatggagatttctggttggtattttctggtgatggttgattgcatgatgctggcatggcccagtccggcagcgatggagggagccagtaaaatcctgttccatccttcagttttgccctgtgccatccttgtttcttatctctggatatctgcgcaaatccttcctcaagattatacagataccgtcctattccccactgaacggctgcgcgcttcattgctcctgaacgaccgcctttgacggcttctacctgcgtgttttcagcggcatcccatttagttacccattcggaatcaatcttgattgatattccgcattcaacgccgccattgtttggaatatcgcgatattcattgcgccatccggcctttccgcaaacatcgtccaggcgtttcatgattgccctgttcgtgacataagccagcaccatagcccataacttcccatcgcgtgttttcccgctttgctgtattcgccactcaatatcttcagcagcgaacggttcatctaacagatccagattcatgagtaataccccgcaaattcatcccagctaataatcggattctgccgttctgcggctaagttaatttgctgctccacttcttcctcaatttcaggaggaatgagggcaataaactcgttatcatcaaaatcatgcaacatgacgcgcctcccattcttcgtcctgccacttatcccaaccaagagctattcctgcagcccatgtatacgcatcagacattccctgttttgtatccggaaatactttctcatatagcttgttgaactccctgtttccttgctgaacaagaattgttccgttaacaggcgtaatggtcatggcgtggtactcctggctgattaagaatttcaccgagacgtttccatccggcccgtaattttctggtgatacgctctaaaagtgattcattaagttgggcgatacccatgacggcaccgcccgcgatagcaaatgtcatcgtgggactctccattttcatttattggcatagctaaaacgcctcgatatgaagcgctgtggatatgcgataaaacagccgcactcaggcggctgttgttgtttcttctttcaggctttcgatatattcacgcgggtcgtcgtaacactggcattcgctataccaatccacccagcgatccgtaagctccatttcttccaaatcctggtcagtaaggctctcatcccacatctcaaggccgttagcgttgcagtaatcaggtttgatgttgttgtcatactgaaatgcgtcataatcagccagtgcatccatcactcgcacaccctcttcaacacttgctacttctacaatgaatggcttcataggaacttgcgggatatgccagacacgtaatttcatatttcccccaggtaaaaagaatgccgcccatatagagcggcaaataacatcaagggatgatttttcgattaaccagaacgagtcgtcgtcctcgtttggttacgagcgatattgctcacaatgaccactattaaaatggtcattaggtgcttattcgctgacaaatttggtaagactttcgtgtagcgaaaccagaatttcatcatcaaacccatcaagtaatgcttgttcgataagttttataatttctgatgcctgctctttatttatttccatcactcctccccaagagccttgctgatggctgcgcgagctttattgattaccccgtaccactccggataagtcacattgcgtccttctgccatcgctttttcagccaattgaagagcctcgagcaaatcaggagatgctgctatcaagtgtgcattggcctcacattcagctacgcgattttcgtcatgggtcatgataaaaccaagctgcaacccagctctatcttgcctgcaaatgcgtacatcctttccgctccaaggacctggcgtacctttaaactttttcatattcacctctgtgtctcgctgccaaaaatacgcttactcagttacttcatctgcatattctttacttgttaaccaatccgggcgttcacctttaccaatatagaaatcgataatgtccagaagacgtggataaaatttaagagctttacgaccatccatctcagcaatttcctgcttactatattttctccattcctcaactgtgtggttctggcatcctgctcgtacatattcaccgttcgttatacttatgaagtatttctcacccagaattacgaaagtgagatcaggcaggtcggcatcgcgcag

SEQ ID NO: 8 - protein, 637 aa, unidentified
  REGION 1..637: note = the amino acid sequence of a tailtip protein of a bacteriophage
MSFFAGKYTDGKTVLSLNRASGGDVNVHYSPNTNSIFHSDMPHMFVKRRFQVGLGNAGNGYFTGALPSDLSYLLANRANVILPVLVVRDNADGTEYYHQMTGIQRNSTYRWRNLYENISIWGQYTGSIQFDLNLEWGYWKQGGAVWDQIGNYGTGGHIIFDHEGGEDYVADAYYDLAGGWIMYQWRDPQDWYMYTNWIPRAQSRPIMNYEDSQNLVNPDYMHPLGPSSSVYDAVYVRAGGARCATGMGDPNSYGNTAFTKYRDLDFPYQIPMANSSSAYMTAGAERHVANGRMSGFSEVYYPFTPVRMEYLWLNVTFDNYWGYSAENLFTGNDIKIAKDSFIIKGVDLRNTNYEMLAAVSTGTPSISNTYFSSNVFAWSSTEMDDGGAFRFFGANAWGGLKGFTGSNTGSTVGNSTPWNIGLYRLPQNSNIEINSPQNKIAINGVDIWSPNVRPLQLFTQNKANNIILGDNGRLYPMAYGETRLINTVDVGLGGSPEPSTILLSIEWMGNSLCDTDGDVNMQRIGNNAASGAGSGPYVGAARRLTKYDYDAGDGVSHQIVVLHTNTFVPILTTNTISYAGGAAGAPRNKFQYYIRKNASNILEFWVTSRALPMSGLSVSYTPWVQYHKLRLNIQRLT

SEQ ID NO: 9 - DNA, 1914 bp, unidentified
  source 1..1914: mol_type = unassigned DNA
  misc_feature 1..1914: note = the nucleotide sequence encoding an amino acid sequence of a tailtip protein of a bacteriophage
atgagcttcttcgcaggaaaatatacagatggaaaaacagtcctatctttaaatagggctagtggaggagacgtcaacgttcattacagtcccaacacaaactccatcttccattcagatatgccccacatgtttgttaaacgccgttttcaggtgggtttagggaacgcaggtaacggttactttactggagctttaccatctgacctcagctatcttctagcaaacagggcaaacgtaattcttccagtcctagtagtacgagataatgctgatggtacagaatactaccatcagatgacaggtattcagaggaatagcacctatagatggcgtaacctttatgagaatattagtatctggggtcaatatactggatctattcaatttgacttgaaccttgaatggggttactggaaacagggtggtgctgtctgggatcagattggtaactatggtactggtggacatattatattcgaccacgaaggtggtgaagactatgttgctgatgcttactatgacctggcgggtggttggattatgtaccaatggcgtgacccacaggattggtatatgtatactaactggataccacgtgctcaaagccgtcctatcatgaactatgaagatagtcagaacctagtaaaccctgattacatgcacccacttgggccttctagtagtgtttatgacgccgtgtatgttagagcgggcggtgctagatgtgctacgggtatgggtgatccaaactcctatggtaatacggcttttactaagtatagagatcttgatttcccttaccagattccaatggctaactccagttctgcttacatgactgctggtgccgaacgtcatgttgccaatgggcgtatgtctggatttagtgaggtttactacccattcactccagttcgtatggaatacctatggttgaatgttacgtttgataactactggggttactcagctgaaaatctatttactggtaatgacatcaaaattgcaaaagattcctttataattaaaggagttgatttaagaaataccaactacgaaatgttggcagctgttagtaccggtactcctagtattagtaatacttacttctctagtaacgtgtttgcctggtcatctacagaaatggatgatggtggtgctttcagattctttggtgctaatgcctggggtggtttgaaaggatttactggaagtaatacaggtagtacggtaggtaactcaacaccatggaatattggattataccgacttccacaaaacagtaatatcgagattaactctccacagaataaaatagctattaatggtgtggatatctggagtcctaatgtaaggcctctacaattatttactcagaataaagctaataatattattcttggagacaatggtagactgtatcctatggcgtatggggaaaccagactaataaacacagttgatgttggtttaggtggtagtcccgaaccttctacgattctcctaagtattgaatggatgggtaactctctatgtgatactgatggtgacgtaaacatgcagcgtattggtaacaatgctgctagtggtgcaggtagtggcccatatgtaggtgctgctagacgtttgactaagtatgattacgatgcaggtgatggtgtttctcaccaaattgtagtattacatacaaatacctttgtacctattctaactactaatactatttcatatgctggaggtgcagctggtgctcctcgaaacaaattccaatattatatcagaaagaacgcttccaatattctagagttctgggtaacttctagagcattgccaatgagcggtctgtctgtttcatatactccgtgggttcaataccacaaactaagacttaatattcagaggttaacataa

SEQ ID NO: 10 - DNA, 113946 bp, unidentified
  source 1..113946: mol_type = unassigned DNA
  misc_feature 1..113946: note = the genomic sequence of a bacteriophage
tataatatttatataaattaatgagagggaaaccaaatgaaacgttatctttctgtagtatttcaaactggtggtcagcgttatacctatgaatttcctgagtcttggaaaattaaagaaggtgatcaagttgttgtgttgacaccacgtgaaggctttaaagtggttacggttaagcaggtgtttccaaaagatcacgaaccatctaaatctattaattataagatgattcatggtttagtgcgaaaagtaccacggacagaagttgaggtagataaaactggagaagctaaataccagtatacttcttatctggacgagatgatgtaacaaaatgctctgatagttcaacaggttagaacaggcgaccgataatcgtcaaatcttggttcgatcccaagtcggagtaccacataatagttagttggcagatcggttatgcacctccttcatacggagcgactagagtggttcgattccactactaactaccaaacagaagatcaggccgcagtgccagaacttgctgagaagagagtccacattctataaatggccgggcgtgacggcgggaagtagaccgcaactctatgctatccaagagtataaatgtagaagctaagactttagatagccattgtcttagcgtgagcgatcacgtagttgcaacagaccaggaggaccgcaacgttaaaatcaaagctcctgtgcttttcttcttaatcgagaccatcaatctcaccggaatgctagcactccaacagtagctagtgattaagagaaaagcaagcctgcctcccagtttttatcttgcttctgggttatcaaaaagctgagccaatttctaacatcagggagatctaatgaaagcatatcaaaatcttaaatccggcgtaattaatcttgttcatgataatcagatcattcagctatactctaaagacagtgaacttaaacagaaagttctagttgaagatctagaaggtatcacacctcactttgatcctgaagccttccgcatcgtagatgttgaagtagttcctcaaatcgaaggcggtcagcacctaaatgtcaatgtattaagtcgtgatcagcttttggatgcacagaaacatcctgaaaaataccctcagttgaccattcgtgtctctggctatgctgttcgatttaatgcactgacgcgtgaacaacagaacgacgttattagtcgtacatttactcaggcgatctaatggggtttggatacgatttctcccaactacgcaaggtagtcgagcaaactccatttatctccgaagttttaggagaacttagtggacagagcattaagacgtcatcatcgtcaacgtgtaaagaacaatcgcaagaagtactggacagtcttccctcatgaagaaagtcctaaacggttaggtattattactactacaccttgtatttgttcttgttggatgtgtggtaatccccataaatactatggtaatagtaagtcaggaatgaaaatttcggagcttagacaaatgcaagacgaatttgatggttttgtagggtggggcgaaggtattgcagtagaggatgagcgtcctgatctttaattaaataataaaccccggctattgaataggtagttggggttttcttatatacacaggattttcaaaatgaaaatttttaaagtgaactaccgtggactatggttaggtggtacggctattgttgttgcggaaactgaggaagaagcaatcgaactggctagaaaccatagatcttctatagagtttgaagatgtgacagtagaagaacttcctagcgctggggtagtatacaacgataacggagattactgatgttatatttcgaagttcgcccacattaagttaattcacagacttaatggagaaaatatgagccgtacttatcgcaaacaatctggaaatcgttactggcgtgacaaacaccgttgtacttacaactttcatagcaccaacgtgcgtattccatatgtttacactgatcgtgatggtaaacagtggaaatactaccgagttcgctctaatgaagcatgggctatgtcttgggatgaagtagatgcagagattcaggaaggcatcctgaataacgaaaagaaagatggtcattggtgggattctatcaatcagaatgttaaatggcactctaacaaaatggttcgacaaggaaatcgccgtgagttacatcgtgtaatgaaagatccagaaaattacgactacaatcgagatcacgaccttcgtaagaaaggcatttggtggatctacgactaatttcgtaaataattcatttgctaaaaccctctttatttgttataatagttacataaattgatagagagggctttgaaatgaaaaatcgcttagactgcgctgtccatgtccttgagcatgatgcacaaggaacctgcatgtcctaccacaaagtagggagtctgattgttcaacgtgttgctgatgtttgtagcctgaagatcacacatgacgaagctgacgaattactaggccaagccattgaaaagactgagatcttcctgtgtgatgagtgtggctggtggtgtgaagcacacgaacattcttacaacgattatgatgtatgccgtgactgtaatgaggaagaccctgatgaataagtttattattgcactgatggtttccgcagttagtttctgttccctggcgtctaccaaagtttctatgaaaaatggtaatgttaaagttcaacagaatggcattattaccgagtatggtaaagtacgtgatgttaaagaacataatggtaaagtagaaatctatactaataaaaacttctctactcctgctgttactgttagcaaacgtggtgaaatcactactcaacgttctaacaattccgattcgtttacttgtcgttataactgcgactttgaaggtgaagatgagtaatttagatcctagagttcaggctgctgtggatgaaatccaagatcagattgatgaagatttcgtagtctgggctagatttggtaaaggggaaggctgtcagctttatagtatgaagctagggatctcgattgaggttatacttcaacctgatggttctgtaactggtgagccgatgtgtagtgtaccaggattttctggattcattactggtatgaagttaactataccaaacaaacatctttaccgagttgtatgtcaaatagaaactattaagcatttcttaccaaaagacaatattaatgaccactatcatgaagttgtagcagcacacatgatggccgaacgtaaacgcaggagagaagaacgtgaaagaaataaacttaaacagttatgcgaggattccagcaacggaaccagttctggagtatcttcgtagagagcatactgaattctggagagcttatacttatgagcataattcagacgctgctattgttttcgcagataaacgtattgcagaatacactgatccagtaattactgatggatttatcaagatgcctctttgggatctaatgcaaaaattcggtgacacaatgataatgggacaagttccatatttcactgaaatttactttgacgaaaaggatattaaatgattgtttctccgtttgctctttggtttattattggtgcagttattgcaatttatagctttattgatgatgtatttgttgctaaaaataaagacgtattgctagaacatatgaaacgaacttctccagatatactaaatcagctaggaagagataaaacatataaagcaatactagcaatatttattatattcgatacactatttgggcctgtagctctttatggattctaccgtaaaactcgcaaaatgaaacagctcaaagccgaatactttgggaagtaaagaactcgcgtaggaccgagttagtgtcacctactaacgttacggaggggagtcgtgccccccgacaggcaaaagtggtgagttggtcgctgacctcaattctaacttaggagctaacatgacttttcttttaattatttttgttgcatggctattgatcggagctggttatgcaattgcattaattcgtcatctggatgaatactccgctgagtggtttgtaaaatacctacgactagaagataaagctgaatctttttctagtgaagatgaacgaaaagctgttatggaaatgaccccgaagcaatgtttacgatacatgcgctttattggcttctttggtctactattccttgggccgattggtactacagtcgctccgtataaagaaacagttgccgacatcaaactatggagaaccgctggatcgctacgtcgtgctagagaattgagtactaaagaagattgatctcaaatcaacttactagcaaaataaataatgacaaagcccagcctgcacttttgcgactgggctatttttgtaataaaatttcagttgcacagatgccccaaagtcttgtataatatgtttatagattgaggcaaaaggataatttatgagaatcatttcaaagttcaatgatgtttatgatttacagaacagtttatttgatcccgatcgcgtttgggaacgtaaatcagacgagattctggtaaaagtaactgaagatgtagaaaagaacatcgtccatgatcgtcaagtatttcgtgaaggttccatgtccttccgtggtgacttcgaatatcgtgtaaatccattattcgttgctggtgaggtttattggttacatgagttatactgctggcatccagaatttagctttaaaacgtttagcctcgatgcagtattcgacaaaatggaagaaatgggattacatgctcgctcttacttactagacaagagtcgaggtaatgttagagaatccatgcgagatatgctgattgaagcaaaaccaaaagcagaacgtatcttatctgaactacgagtaccaattgcttatgtgaagggtattaagaagaacgaaaacgatgatattcgcaacttcgttattcagaccaacattcgtttccatcagtccggtattccgtggcaggaaattgaaagtaacttatatcgtttacaccagatgatcgagcaatatatctggggcgtattaggaactggtgaaccagatactattaccacttccgataaggatcgcttagccgcacatggatttgatactgttacttcttttaggaatatgaaaagatgatcagtaaggaagagctaagaagaatgttcgattaccgagatgatggtaatcttatctggaaacccagggaaggggacgaacactttaataagatattcgcaggaacagtagcaggatctagacaaagtacaggacatagagtagttgagctgtataatggttctctagctataggtacacatagattaatctatgcatggcatactggagaatggccagaaatagttgatcataaggataaagactcaactaatgataggtttgagaatctaagacctgctacaagatctgataacgcttgtaatcaaaaagtaagaagcgataaccatttaggcgttaaaaatattcatagaaaaacaaatgggacttaccaagtaagaatcactaaacatggtaagcaagtttcgaaaacacttaagagtttggaagaggccatagaatggcgagataccaaactcaaagaactccacggtgagtttgcgagtacaggctgatgtggaaatggtttgtagacttagtttgggataataaaatgtatatcctgggagctggtcttgcgataggcatcggattcggtgcttatcacttagtaaataaggttgaaactctagcaggtgatcttgcggtagctactaaaaagattacgtccctagagacttctcttaataatgtgaaagctgagagtgagcttcgtgaaactcgtatgaatcagtatttcacaatgaataatgtttcccaagcagatctagacaagaaaattagtcagcttgataaagcacttagtcgtcaagacattatagctgcaaagcctggattggttacattaattgctaaaaagcagagtaaggagttcgaggaaagattagcatgtttaactggaaacttggagtactgctcgcagccgcaatcacaatcacaggctgtgcagaagaaataaaaccagagccttcacatgagttaaagcaagctcatgttgactggcctaaaggacttcagccgtgtagttttgatttcaaattcgaaaagaaattagctacaaatggcgaagatggcgtagtagttgttgtaccatacaaagattggaatgctaaagcaaaatgcgaggaagcagtttactcttacatttcacggctgactagtatggtttgcttctaccgccaagatttacaagaaaaacgttgcttagtttactatccacccattacaaataggaaagattaatgtcagtattagtcggtttacatggtgaggctggtgcgggaaaagataccgttgcaaaattaatgattgactggtgtaatgacacgtatccaacgtgtttatcccgtcgttacagttttgctaaacccgtttacgaacttgcatccgtaatcctcggggtaactccagagtttctgggagagcgcaggggaaaagagattgaccaatggtttacggtcacacaatctcagttggagcgagctagagacgtatggtttaagtacggtattgataagtttgaggacttctcgtacatttggccgatttttgaaggaaaataccttgatcctcagcaattgattgggcaagaagatgatgcactctacagtgtgtttatctccccaagaaagatgctacagcttgtaggtactgagttaggaaggcagctggtgcatgaacgcatttggctcataattctggagcaatccatcgctaaagacgacccagacgtcgcaatagttacagatgtgagattccctaatgaaggagagttaatccgagaaaccaatcatctagatatggattctttgttgataaatgtagtaccagcggagcaggaatacactattaagacagatcatccgtctgaaaaaggtatcccagctaaatacataacccatgaactggtgaatccgttcatcggtatggataaccttaaactagaagtgtataacttctgtgacttagagctagaaccactaattggataattaaggatcactatgactaataagaaagaagaaaagactaacctgttccactccgttcaccaatctaacgagtatacctttttctttgacgaggaactcgggccagcagatgagtatcgtgacttatctatgatcctggtgcaggctaatgaaggagatgtcattaatctgatgattaatgggcctggtggttatgttgatactgctgcacagctatctaacctgatcgctaactgtcgtggaacggttattggacacctgctcggtcctagtgcttctgcttactgcacaatcttcctgtcttgccacggttgggttgttcatccacactctacgcttatgggacatacgttctctggcggattctgtgagaagggtcaagaaatcaagaaagcctatgaatcttacaatcagtttgtagaagatatgatgctcgatatctacttcccgttcttctccatcgaagaaatcgaggatatggtaaaagagaacaagaatatctatctcaacagcaaggaaatcaataagcgtattgagaaattggcagcgtaccgcgaggagcaattcagcaaagctcaatgtcctcaccctgaggaacatggagaagtgtaagtagttttaagccagagtttaacgactctggcttttcttttgcctaaaattcttcttgacaacgacaaaattttgtgctccagaagtgatctttaaaaacacgttgtaattttcctctagaattagtataatggtaatggttagaggaggttacaagtggaaaagtttctacaactattaacggtactgctccaagaagcgaaagatccagcatcgcttcttaaacgtctgctaactatcttagttgctgtcattattttcttatttgttagtaatactagcgaggtgatgtcgttcttaaagactttctccacgtctgcggttttacaggatgttcaaacccaaaggatagataactttcctaatgtagcgagagaaaagagcatggttcttttctcccagacgggtgcggatgctgtttttgtagtcaagtataaacccgatgctatcaatgattattccaacattattgcatgggaaagcaatgcgcaattagatagggctgacttggccgataaagcagtaaataagacgtctgagatgtatagacgtcacctagaaggttttaactacgcttcggatttaactgtaaagattaataaatacatgggggcaaatatcccttcgtttaaaaacgtaacatttaattatatttacacgtgtccgtatttcaaccttaacaacatctatgctggatatattggtgttgcttggaaggataaacccgtagataatgccgactcggaacaatttaacgagtacttaacaaagctctgttcaccacagcagagatcattaggtagatcaatatgagttttaaatttggtaaaaatagcgaaaaacaattagctactgttaagcctgagctacaaaaagtagctcgtagggctttagaactatctccgtatgacttcacaatcgtacaaggtattcgtacagtagcacaaagtgcccaaaacattgctaatggtacttcattcctgaaagatcctagcaagagtaagcatgtgactggagatgccctcgatttcgcaccatatattaatggtaagattgactggaaagatctagaagcattttgggcagttaagaaggcttttgaacaagctggaaaagaacttggtgtcaaacttcgttttggtgctgactggaatgcctcaggggattatcatgatgaaatcgatcgtggtacctatgacggtggtcatgtggaattggtttaaatagtaagttaaggcgggcttgtcccgccttttaaagcaaagggggctttaataacttgaagataggagaaagccatgtttgcagaactattcactatgatgctgctaggtatctggaaacttagtctagtagttttcgtgttaatgataattctaactgttgtcgcactagttacccaaaatgatctgttaaaaagagtcattcacgggctagagtatataattatgggcacattcggcgtttgcaagtgcaattgccagaggaatacgaaatattgttggttatggatggaattagaaaattgcatttccgtagccctggctgtctcattcggtatgattcttatggcccttactctagcgttaataccgttaatgttagctgggggagttacggcttatttcactcttttctcccctatacttatgtattcgatttatccaataactatgtatttagttaggaagagattcccacatcaagcacattaagataaaaaagtagttgacttcctgccgaaatttttatataatatttgtataaattgaatcagaggagttcacaatgtcagatcgttactatactcagatggctaaccattacaatatggctccgtatgaattgaacatcgcattacgtgacctcgattcaccagagcgtgcaaaacttgagaaaaaggcaggtgtgcgtatgtctagcaatggcaagaaacttactcgtattgacttaaataccatgctaatggaagagcttggcgtgaatattgaaggtcagaagttgcctctcaatgttcttgaaacgatgctggataaagtcaagaagaaaacttataagaaagtacaagtaccggaaggcaggctaaaagccccttatcaggctgctgtaaccgagtgcttaggtgttgctttagatctgagcacagcaactgtaaaagtgatgaaggcatttttggaggccattaataaacatgagtaaattagtatatctactgaaaggatctacctgcaacccgtgcaagatgtttgaacctgtatttgataaagtagtcaatgactatagcctggaagtccataaagaaacggacaacacagagctgatgcagaaatttggcgttcgtcaggttcctgtagtagttctcgcagatcgtctgccgaatggtcgtgtagaagccaatcacattctgattggacgtcagcttcgtaaagaaactatgcacgaggccatcaaaaccttcctggaagataatccagaagattaataaatccaacccagatcttagctgatctgggtttttattacttgctttctgctaaaaattttgttataatatatgtataaattgatgtataaattgatgagaggagtatcacattgaattacgcatatcttataatacataacaacgtggtctgtggtactcgcgctgtcgaaatgggtatcacagaagaaaagtataagtccctacctgagaaggaacaagaatactatgttgaacaagctgcttgggagtatgctgaggcttatcccgaagaacgtgaaggtcgcgttactattgttgttactttgggcttggttggggctgataccgaagttgatactgacctagaaacaatggaagagtgggaagaactggatattgcagagcaaaatgctattatccgtgaatctttctgggaagcggttgactgtcacgttgtctttgagccaaacgatacagaagctgaaaaacacactaattggatgactcgataatgaaaaaagaatttaatctgcatgaaactctggtagtaccagacgacgttaacctgttcttcgtaggggatatccacggctgtaatgatatgctggaagatgccctgaaactggcaggctacaaacctaaacgcgactatgttgttggcgtaggtgatcttattgaccgtggcccacagaacttacaggttctagccaaattcctatataacccacgcttccgtagcgttcgtggcaaccatgatcagtttatgattggtggtgattatgccaactggatgtacaacggtggtatgtgggctatgaatgatctggatactgatactattaaaggtatcgcagcagatatggctgctaaaatgccagtattcatgactgtagaacatcgtggtaagcgttatggtgtagttcacgctggtgttcctttccagtacaaagacgctggttttgatgtacataccccgaattgggatgacattattgcacatattgaggcatctaaaaatgacccccatgatcatccagctcactatattgagccatacctgtgggatcgtgatgtgatccaggaaattgggttccatctggctaaaaatggtgcggaacatccatacttccagcgttacgcaggatttaaagatgaactgactgtaaaagtgccagaagttgagggtgtggactttgtattccatggccatactggtatcccttacccgattctgtacactaaccgtgtttatctcgatactggcggtgttttcaacgggcagttgacggttgcgcaggttaacgatgaagccggtaagatcatgacatttaccactgacaaagatgatagctgcggtgtacagaggattctataatggaacgagaagaacgttatgtagttataaagctatctgacattgagaaagccctagaattagggcatattactcaaagtaactttactactttggaacatatcttatccaaattgtggtttagtcgagcacaacgagggaaagaggatctcaagacagttgtagtagagcacgattggccagagtatgaagaagtctggaaaatgattgagaatcgtgtagcctatgaggaagctcgtcaagagcaattagacaaaggttatgctgatgcaaaggaacatcatgagattcatgaagagatcttcctgctaagaggtatcagctcctactgccaaggctggaataactatgctcagaaggttctttaatggctgacatttctcaggagtacctgaagagtagactaatctatgatcctgaaacagggaagtttcagtggaaacctaatccaaatgctaataaaacatggaataccagatttgcaggtaaagaagcaggcactttatgcaaaaccacaggatacattaatctaacaattgatggtataaaacatggggcgcataggatggccttcctgtatatggaaggttatttacctgctaaagtagatcataaggatacaataagaacaaataatgtctggagtaaccttagagctgctgatagtgctcaaaatacttggaatgttggtataaaaagttccaatacttcaggatttaaaggtgtctatctggataaacgtatcaataaatacgtaggcagggttcgtttcagagataaaagatacgacactaagtaccatgaaaaggctgaggatgccgctaaagaactagagatccttagagaacaattacataaagaatttgcgaggaatgaataatgcgtgttaaattctggtcggatttgcacttagaccatcctggaacactacgtttccgtccgtggtttaagaatatgaaagagcacgatgaatatatcctagataccttgtctaagcacattggcaagcgtacaaaacttgtgctggtaggagatattgccgtagggcgtgaaggattggccaaattgaagtcggttatccataatgtgcctaaccagcttattatgggcaaccacgatgctgaacgtcagggtattcgcattcgtgatctagtagacatttacgatgatgttcaggctctagacaagcaaagtggtggtggcaaaaagttctggctatcccacgcacctatccacccggatgaacttcgtggtaagctgaacatccacggacacgtgcacaccaattctgtacgtgaccaacgctatatcaacgtctcctttgagatgagtaagacacctatttccttagaagatatcgtatctggtaagtttcagacgtggaacaagattgttgatccagtaactggtgttgtatctgaaattgatgctggagatttagcaatgggagtatatgatgtttgattttgatggaatgactcgtgatatagttgtagcagcagcaataattgttgctgtttctttcttacttggcgtaggaataggtattttattataaaaattcagttgctaaaacgcttagttttctgtataattactttataaattgatgagaaggaatcaaaatgcaaaagattgataaagcactcttaaccgcagcggcagataaatttgagcaagtcaaagctactttcaaagttatcttccaatcttacgttcaagataaatctaatccgatttctgagcgtttgatgatgtgggaatgtttcgcttgtaatgctctattgatggctgattatcgcagtgatgtagatgaagaattggtaaaaattcttgattcggacgatgttcaccgttatcaattagttatcttccaagacctagctgaacgtatcattcctgatgatctttgggacaagtattacggtgatcctgaggaagagggtatggaacctgagaaatgcatcgagctgatctgcaaaaatcatcctgagattgcggaaaagtttgaagcggtatttgcttctgagttctccggttttgtgaatgactggtaattaatttaaaaattcacttgcttgatgcttcaaaatgctgtataatagcttcataaattaatgagagaggattcaaacatggaaaacatgactaaaaacgaaatggcaaacgtactggctatcctgctggatatgcagggtctggaaggtcagctgatgaagatgtccattccggcaatgaagaagatgtatgattctctgaataagaacgctatggcattcaatcttgctaaacaagaagcacgttttgcgaaagagcatcaggcaactgctgaacgtcgtgcagcttcctttgagcgtgaagttaaacaactgaaaggtaagaaataatgactaacggaaaattcttgcttgtactagggctgaatgccctagtttctgtagctatcacgctcggtgttactgattttatgctctaccaacgtgataaggtagaggatgcacctttatccttctcagcaattgaatatactaacccagaagcatatgatatacgttatcaagctaacctagacgagggtctttcgaagtattctggtgtagaagttattgatgcatataaactggatgatatcgctgaggcgaaacttcagattgaagagggcagacgcttctgtagagcaagcgatgcatccttagtaaaaattaagttctacagaatgacaagcccctacattaagtgtagtaatggagtaacagataaatgataacggaaattctaattggattgctagtaactacaacaatagcagcaatcggtggtataattggcattattaatgctagcaaaaacatggaagctatgaagcttaccaataacggtctttgggaaaagtatgtagctgctgaaaaagatatcgaggacgcgcaaagacgttcagatcttttaaaagaaaagctcacaaatatagaatcaatagcagggaatacgaaattgcctcctaaaatccttcgttcccagatcatcacggagattaagaaatgattatgtttctcttagcgatgtaccttgtagttattgcagttttggttcaaaaataccatacttggtctattaagaatgttgcgaaagtagcactatttattattccggttccagttcttattattgctctagccttgacgatgatcgcaggtaagatcactaagaccaatgtaaaacgcattatcgacgaaatccaacaatcttctgacctaatcgaggatatcctgaaagatgaagcttaatcatttagaagcaaccttactgcacgagttcttgggttttgttaccgacggtttcattcaaacagatacccaaactaccgaagttctcactcgtattcgtggaaagctggaaggtacattagaagatttctggcgaccattgtctgaactgcctccacttcatctgaaagtgattgttaaagatattgagactggcgaagagcgtgaaatgatccgtaaagagtatgcggatagttattccccagcttctatggttatgcaccacgacgatgaagcagaaaccctttggacagcccattacaaatggcgcctcccgtgattgaactatcaactgttacggcaatcctagtcttcggtttagtggttgccgttttcattatcgtggagcaagccaaagtaataaggagacttaaaaacagatgatcaatttttataaccctcaattgcaaaaggcaatatgggattactttataatcctgccagctttcatgttaagctgtgcaatcattaatattatgtatcaagaagctggctggacaattcaagatttccatgtttcgcaagttttaccttttatgtatgaaggctttatcgcagcaataaatggagttcgcaaatgacagcactacaaagattacaaaactactggtttgatggccagttcaatgatctgtttatccagttatttgtcgaaacgaatggacgcttcaattatcgcttcttcaatacgttccatgaatcgaaatattctcatacagaaattaacgcggcgattcaagatctcacaggttctaaggtaattacttatcgtgaagtagatttcgcacctgattgtttcggttttggattgttcaagaaagcataccaattcggtaagtttgaagacgcacgacattgggttcatgacttctggtataacaccgatatcgttcctagccgtgttctgattcttaattggattgcaaaacaacatcctcctaaacagcaaagctcgttcctcccaactgatacaaggaatctatatcatgactcaaaagaaaaatccagttctagagcagatgaagcaattggagaagcggattgaggaaggcactatagaaggtcgagatatagtaactcatgctttcgatcttactacagaccatgctgatccaatggtagctgctgaagccgcagatgttattggccttttaatggcagttgggcaactaattgaaattactcaggaagagattgataatggtgaagaagtcaccgttcaagatgttcttggtgctgtagatctggttgttaatgcctatgcttttaaacgtcgtcatgcaattaatgagtattcagtatctcgcgaagttacagaatcattaattgaaaccgctggcttagctttgcaaggcaagaaactccactaattctagaggccaggacttaattgttctggccttttgtgtatactatgcgtgataaaataaatgaattactttatgaggaagctctagcattcccatataataagttcacaaagtctgatggatctattaatagaactaagatcagacagttacatccagactttcaacaagaagcactaaaccttatattcattagaagagctatcgaagctcatggtaagttcttcgggtatgagagagttaagtatagaactatgcaacagcaggttgagatttattgtccagatcatgatggatatttcttgcagactgcacgttctcacttagaaggacatggttgccgattatgtgcacacaaagttgtgacacgccttacagaatatggtgtgtacaccgtacccgcatgtctccacaaatttgtagttgacggtgaacacataatttggtataataaagatcaaaagttaaaacaggagttaaagaaagatggagtatgtagtttggtcaaaccccttagctctcctgtcccacaaattgttcaagacgacgtggggaaggaatgaggtaattgttaatgatattccacttaatcaccaacatccactagttccaaccctgtataagattactataaataatacagaatatttactaaatgattttggtaaagagtttgtacaggaagctatagatgataataatgtctctatgggagaattaattaatagagcagccacgttcgataagagctggcagctaatctggagtaactgatggaatatgtattaattatcctagcaatcgcattagtctttgccattaacaccgctgtgcataagactcgtgaagccaatcagattattgatgataatgtgaagttgcgtagcgaagtcactaatcttaaacaacagcgtgaggctctaaaattatttgtggctcaaggtagccaagagcataaagcggaagacttcatcgtttacctgaaaaaatacatggggattaaataatggaagtattatttctcgttatattagtagcgtctctcgtggcaattctaggtttgatatgttgctgtagtagtctcaataccaagaatctagagttaattagtgagaaccagattctcaatcgtgaacttaaacaatatagtatagcagctcgcaagctgttagacaaactggagaataaataatgtttacacaacaatctattaaaatcgtagcagaccatgaattagatacaggggactacagctttaaagacttaaatgcaacggttcagttcaaatccatgaagatgtactttttgcacactgatctgcaaggttgtaaagatttcgaaagcaaactcattgatgctcgtaagatctttggcacggcacgtatcccagctgacaacctcattaatgctctaatcgatgctggatacaaactcgtgaagactgaggtaaatcgtcctagtactaacagtatgcagctaccgtctttaggttctgggtatatcacagcaatgacaaattctgataaaagattaatgtcggatatgcacagtgttaaatgtggtggtgttatcgaaacttccacaccttataagattggagaagattacagcccttctatacagttaagacatactcaggaagctcttgaatctgatacgcgaagcgtagcaccagcggatgctggagtttctaggaactcttatactattcatctgagtacaccatctagtaaaaatgacagctttgctgatgcagttatggaagctcttgttgacttgactaataatagtaaaggatttaattaatcaacacataagcctctacggaggctttaaaataaaaagcaggtcatctgaccttaaaaaggaaatacaatgagtacatataatttcaaggacaaactgagacaaaatgctggtaaaggaaaagctaaggaaacaaataacattcccaatgctaagatcctgccgttccctgaactaacccaagaagaaaaagataaactagcatttatgtttgacaccttgctagggttgaatggacgtttatattctacattatctttaaatgagaagcgtctagtagagttctttggaaaacgttatcaagttacatctaagggtaatgcccttaaagaaggggagaaaccctacacagttattaagatcagtgcatatgcacatcgcttcttaattcgtgcgctagagacagaatatttcacgttaccatcatttagcgcattccatatcttcgaagatgaacgaatgaatattgatgatttatatggagatcgttatcaatattctggaagtccttttcatgatgcattgagaagctacccaaattgttatctaccaattagagcatcacaaggtaaagcaagtgtctttgcagtgtattcaggatctaaagcatctgatctagaaacttatatttataaagaacgcagatctgctattcctgaagaagcacgttatgaaaatccaatcctaccaactaaagaagtcaaggaaaccaaaacttctactcaaacagaatctccttatgttaagtatgagaaacaagttggatgggttctagagatgggtatagcttcaccgcttgccgcggcattcattaatagatatctagaaattcctgacgagttccactcacgttataacacgaatattcagataacagatgaattaattgcaattgcaaaagatacacctacggatactgaggcgtaccagaaagcataccaagagttactgtaattatctgcatgtctcggtgcacaatacctgtaccgagacaacaataaaaactctcgttgacagatagattaatgtatgttatcataactctatgagttaataaaattaaccatttagagttgccacacagaaggtgtggtggttcaggaatcttaaattactgacttgtagcgtaggatacggagcgacaggacaagtcaacaggtaatttaataaagattactagaaacatcacgagaccttctggcaggggcaaagctctatatgagaaccctgggggatcttatacttatataaaaactaatactgttgaatagataaattaacgttcaagatgatacacctgttgccgctcatctgctaggatggcacaacactttcttctagactcctaagtttctaggaaaaccctcgtcaactcaggcggttttcattgttcctagaaactctagtaataggcggttaatacagggcggttatagggagggcggttatttctaggagacattttttgaaaacacatttctggaatttctcatcggatttgcacactacatttctagaaatttatggtcggatttgcacattgataggagtctccaaagtttttaggaacactgaaaatagcagcattatttcgggccgaaggcccataattgcctgagtttttagagccacaggaattttcacttgtcaagcgattttgccccatttaactaataaaattttactttatctcgaccaatctcaaatcttcccaaaacatcccacattatccccaaaaacgcagcaaacaaggcgtttcacgccaccaccgctgccccttccgtttctcctcttattttctctcgttgcatcaactctcccacaaactcacacaatcacacaccctctcatcgaagtcacaaaaaatcttgtcggattcgcacaaataaacccatgtcggttttgcacatattctagttaattccacaggaatcgagccacgctcgtgattgctggagtttttaggaaaattcattgtcggattcgcacactataaaatattttcgggtcggatttgcacactaccaaaaattgtcggattcgcacatacacgccagcacgtaatccatgggggcaaatgtcggatttgcacaaaagcgcagggcaaatgaaaaatgccctgcttgccgaaatgcgaatgataatgagaacgattcgcatttgagaagttgaatgcgaatgagaatgattcgcgtttagaaattggaatgagaatggttatcatttatagagttgaatgtgaatgagaatgatttgcatttagaaagggaagtgagaaacgctgctatttaagttatccacaggtttatcaacagcacgatttgacttgacaaaatcctagcgattttgaggcgttctcaacagacttatccacaggttattctactgtataaatatacagtattcctatgtagtgaataactctaatataggtctaaaacgctctcaaacgcgttctaagcggtttaattttggaggaggtattttaataaggggaaatttgtttgcaggcagaaaaggcggggccgatagttgcgccccgttattattagtctggtagtcgatgcgtgatcttttcgctttcgccgtaggagtctaccaaatgttgatagtaaccatcgttatcataaatcagtttatcataatcccctctttcggctagttgcctattctccagcgtatcaggcacaaagaaagtatcaaccgtggttgtagttttggttataacaattttattgctcatagcgccattgctcctagaatgagaatgattattattaacattgcaaagccattcccaaatcgtaaacgctgggaatgtttcccagcggtattattagatttatgggattgcgttttacgccaccagctattcatacgcaattttccgaaacgctgtttcaatactatcagcggttgattgaatatatgcgcctttcattatcaggcgctctgtgcatactttgcggaaaatgtcaataaactcattttcattttctgcaatcaaaggttcacccataacctgaatatcgcatgagttaaaagtaagaaactgaaaggcaagctcgcgagcgacaacggcattaatcttataatgtgcttttccttcatagatgttaaccacgcctttataaacaggggaaagctgatttaaatagtttgctaacaatgccggacggcaattagctataaagcggttgccttcataaattaccatttgtcaacctcctagagctgggaaaatatcagatacatttttaaaacaaatgcggcgaatgagcaaacaacgccaatggtagcaaacgctagagcaatatataaggatctcataataccccacgaaaagcagcgtaaaaagtagcaaagtgtttaaccgtttcggctatcaaattgccgcgcttgtcaaatttcttttctgtaacacggaaagcgtttttgttgcgtgctacatattcgattttacaatctggacgctcaaacgtgttaacatccaccagcttaaaacctttggaacgggcaagcgaaacatttttcaacataatattagtctcctagaatcagggtaaaaattaaaggtaacaggcaagcgaaagcgatcacgccagccatgatatgaaacgcggtggtaatgctcatctttcgccctcctgtaaatggtgtaaaggcattataacaaaaaaggccgccgattaaggcgacctttacaaaactttacatttacatatatctgattattgcatcgccgtaaagctcactttcagatcttatcacctgctcaaaacgctgatattctagcgccctgttttctttcgggaaatagcaagcgttttctagcgccctttgataaacatgcaattcattatcaaaacgctggacaatccccaattctagcaaggctttatatacttcatcctcaccgtgaccgccgttaacaaattgataacttttggtgaattgccagcggtacgccgttgcgcctacatctggattttctaccagattggaatcatcacactcgcaatcattagcagactcatcacaattctggcaaatttcatggttgctaaaactggaagcgttttccattgccatttcatgcaacggcgtttcaatatcgccagcggggaaataatcaacgcttgcccattgttcaccatgcgtattagtgtaacagtacactagtgcaatgatcggatgatcaattgttgatccggttacaacgtcgccatactttgacattaattagtctcctaactaaaagggaaagcggggaaataatccccgctagttattattactcgctttcggtgttagtggtaaaggtggaaatgtcaatgccttttaccatttcatcgatcatttcagcgatgttaaaagattgtaccatttctaacatcgccgcttccattgccgcgcctgctaccgctttagctttcgcgttagttggggcgtactggtcaaccgctacgcttaacaggttagcgatcactacgcgaccaatcggcgtatcaatataacctttaatcataaacggtgcttttttcgccgccacttttgtgatttgagtcagtgcaattttacccgcttccagtttagcagcgttaacaacggcggatttattagcggcaacgatagaagatactttagacataatatttcctttattttcagtagtttgcgcatttgcgcttgaagtttgagagtttacagcctgttttgttacgttgtcaactggttttaatgtaaatccagcgtttgcaacgtttgaggcgttactaccatcctcaaaataatcgttaggaatcagcatgttaccactagcgcgttcaaatactacaacgcccgttgttgctatggcttcatcattcgaccgcttaaagctggtggaaagatcgccccaaatgctagatagtaacgtttcgatattatcgaacttgatactatttactttagtagcagttacctgctctttttcttgcacgttatatagtcgcgcaatgtaactatcgttactagggcaaaagccaacgatgataaaatcaacgtcacttccccgactgttacggaaaatgtgataatcacggttataaagtacaagcgcccgagtcggatctagcaattgagtaaagctatcaattgaataaagcccgtcctcataatccaaaacgccggagtgtactttttcaacaatgttagcggtatgttgtacgcttgccgcgctactaccatctaacagattgcgcaaaccgcctttaataatagtagcgtttgcgggtactgcaattcttacagtagacatttctttgtctccctcgttaatcggtgagtgaatgatatagatatttgttcgctaggggcaacgtttattttacctttttattttcattgcctaacgcttgtttttgtgctaatcgcgcgttttctatttctagctctctgtaagcgtacacaaggctttattataataagggtagcagtgagaaaacgccgtgtagagcgttttaggccgcttaaatttgattgtggttgttactgctacctttctaccctgtatatttatacagtaggataacctgtttataagtctgtggataagtcctgtaaatgcctcctatcgtgtcaaatcattttgtgctgtgaatatctctgtggataacttaaatgctagtgattctcatttgaccgatagtttcatattgttattatttctctttaatttataagtatattatataatatgaaatagttagttggctaataggattttccgtgattagtagtctgctaatgatttcaaccgttacaatccaccagcgtgattatcatcctagcgattgttagtctgctagctaaccaatacatagcttaacttatttgtcaatgcaaaataacagcagaaaatacttttttgaaaagtcaagtggataactcattaaatttcatttttgctctttgtataagttattaacagggtctaaaacgctctgtaagcgattctaagcgcctttgaggaaaagctaggcaagtgcattggtactatgccgatctcctcaccacgaggattttagattttgtcaagtaggcaagagcagaaataaatgaaaaaattacttgctaaactggttatttgtgtgttattcgcgcgtccgtttcatttaattttaggccgtcgctggacgctgtttttctttacgtttctttacaaaaatacgcttgcgccaatttggggaataacctattatttatctcgtaggacggcaacggactacaacggcgggaaagtttaccgccgcgctctttaaaaattagggaacatcttaaagcctatcggcggtaaacttatataatataaggaatcgacgataatgatcaaatcaaaaaacgctttagtgattagtgcgaaaccagctagcccattaaataaaaaagcaaatatgcttttagaaataatgcagccagaaatgaaacgccgtttcaagtcctataaacgcggtatgcaacaaggtttaccgatgatttgggataacatgatgattaatctaaaagagattcacgaaaagaacaaaataaacgcttgacactctagccgataggttttaagatgttccccgtagtaagcagtaacgctctttaacaatatggaaaaacggtaatgtttaggctaactcctagcggattataatctaataccgatttaaaacatcaaatcggtattgtggaataatccccaataaaccggagtattaaaaatgcaaaacattatttcccctaaaattggtcaatccgttttcgttccattcattactaaactgaatgaggaaacgggcaaaattgaaaaattgcaaggggcggcgcttgatccgtgggatactattaatgcggtatacgccgaaacggaaaaaactaaaagcggtaaaacagcttttaatgttcgtttaaattctggcgatgctgttaaaatcatccaaaaagatgataaatggcaagccgtagcataattaatatttaaacctaaaatatcatgctttgagcggcaattatgagctaacacgaaccaataacgagaaattggcaaacaatgtaagaacaaaggcgagcgtattatatacaatcgcgccccgataatatgacgggctttaaattgaaaactataatatagagttttcgttatatattctgaataaagaatatatagcggctaattctagccataatcccttaattaaaacttaaatggagtaatatattatgtctaacgttaaaaccgaaaaaaccgcaaaattttcttggaacgaagaaaacaccgaaaaggctgtttctatgtattctgaaatggtcgctaaaagcgggattgagtttgcgaatagtgacggcttaaaagaaattgccgccgccgttggcgctgcaagtcctgtttctgtacgctctaaactgacaagcgcaaaagcgtaccagaaaagcgataaaccgcgtaaagttggcggcgggtctagcgttcgtaaagctcactatgtgcgcgtcattgctaaacacgccattgatagcggcattgtgaaagatgccgatgatctggcaagccttgaaagtgctaaacttgaaacgctggacgctgtagcgcaattgctcggcgtagcggaggaagtaaaacaggccgcaggtgaataaattctaattagcggggaatattccccgctatccctaaaaggagaataaattgatcttttatcctagtgaagcgtttattttaggtttatttattattgccgccgcttttattctgaattatacgcggtcaattctggcaataattggaataaataacgtttacgccgcaaataatttccgcaaaaacgcgaacattcaaaaatacttgtctattatctttttgacaattggcattgtatttggcttttgttctagtttaatgccgattaattaaatgttgcaaattataacgccttttaaattgtcctcacttcaggcaaggcgttatatttggcaatattgccagtattaatctttaaatccctttaatggagttgaattagttatgaatatttccgcagaaaaacaagcccagatcgttaaacttgccgctgatttcaatttttacggtaagcgtttacgcgctactaaattggaagtttgcgacgatatttcaaaagctgtttacgatacgccgaaacattcaaccgcgatttgtgactggctggaagcaaataagccagcgaaaccgaaagcggcgaaagctgaaaaggcgattaaaaatgatgatcgccccgaagcggcgggaattgtttctagtaccgttgaacaatgggaagttaaatccggtcgccgttttattctaacgtcgattcaaaataatactttcccgcataaaaactttttagcaagtctggaaaaatacgctgaatattgcggcgctgaattgctggtttgtaaattcatttataataaaaacggcttccagaatggagaaggtaacgaaggcattaaatacgatagcgcatttaataaatatatttgcgagaaaaacgtatttttaaataatcgccgctttgctttcatggctgaaattaacgtattaccaacggcagattatccgctttcaggattcgcagaaaccgccacggctttaaatattgaaggtctggcaattggtcacgctaaaatcaccgctgaaagtgtgccagcgttaaaaggtgaaattgtgcgccgtatgtattcaaccggaacggctacgcttaaaaactacatccagcaaaaggcaggacaaaaagccgaagcgctccataatttcggcgctctcattgtcgaatttgacgacgaaggggaattttttgttcgccagcttgaaacaatggacgaaagcggaatgttctatgatttgaatgtttgcgccactcctagcggttgccgtgaaattacaggacacgttttaggcttgcaatatggcgatattcacgccgaaaaattagatgatgaatgcgccgttgcgtcatgggctagtgaaaacagtttgcttgatattctcaagcctaagtatcagtttattcatgacgtgcatgattttacatcccgcaatcatcataaccgcgcaagtggtgtattcttggctaaacagtacgccgccggacgtgataaagttctagatgatcttatcgacactggacgcgttttagaatcaatggagcgtgattttagtcagacaatcattgttgaatctaaccacgatctagcgctttcacgctggctagatgatcgtaacgctaacattaaagacgatcccgcaaacgccgaactataccaccgtctaaacgctgcgatttacgccgcaattggagaacgtgatgaaacgtttaacgtgttagattatgcgcttagaaacgttgctggctgcgaatttaacgctattttcctgactaccgaccaatcctttaaaatcgctggcattgaatgcggcgtacatggtcacaacggcattaacggcagtcggggcaatcctaagcagtttaaaaagttgggacgccttaacactggtcacactcacacggctagcatttacggcggcgtttataccgctggcgttgctggttcccttgatatgggttacaacgtcggcgctagtagctggacgcaaacgcatttaattacctatgcaaacgggcaacgtactttgattgatttcaaaaacggtaaattctttgcataattaaatttaatcggcggttgaaatataccgccattaataaaaggttaattaaaatgaatgttgtattacctaaaacgctagataaaaaacagtatataacgcctgatgatatggagtgcggcaaagtatatcaatttgattatatgctagccagtccgacaaatacaggttgtattattgcagtcgatacccgcgataatgacgttttaacttttaatgattactctgattttatggaatggttagatgatcaaagtgtaactaataacggcgaattaaccgcgtatcaaatgcaattgagcattaaataaatttaaatcccattaataaataatctggagttataaacatgaaacaatcaaatattcctttcgaccgcgccgcttcctctattgttctggtttattctaatggcgagcgttatcacgttgaatcaggtcacgttatcgatgatttgttaaactttaacgaagcattgcaggttactacctttgcttatgctaccggcaaggaatcaagcaaaataaaagggcgtggcgtttatgttgatactgttaaaatggaaacggtaattattgatgctcttaaatccggtctagcctttgcagttgtcgcgccttgccctatgtgctgcgatgatacaacggtatcggcaaaggtctacacttgcgcgggtattcgttccagtgtatcaggtgaagatattagctttatagctgatgctctagcgtatggcctgagtgaataaaggttagttaattattacccgctttgatataataagcgggtaatgctgaattaaccctaaatcccttaaatggagaatgtaacaaatgaatcaagttaacatgaatattacccgcgctttcccgcatatttcccgcgttatgatttgggatttagacggaacaatcatcaattcattccaccgcgtagcgccttgttttgatgataacgggaatttagatttagttaagtattcccgcgaagcctgcaaacatgatttaattatgcaagattccttattgccattggttgaatatatgcgccaatgtatgaatgatgcaaatactttaaatattatttgtaccgcgcgcttaatgtctaaaagcgattatttttatttgcgcaaacaaggcttgcgagggcgcggaaatagtaatattcgcgtattttcccgcgatactttacataaatatttcgaagcggataaggttagcgaaatatatcacagcaaagacgctgtttataaatcttattattttgaactgtttaaacagctataccctaatgctgattttacgatgattgatgatcataaaggtgtattatcggcggcggcaagtgctggatttaaaacgctggacgctcaagccgttaatgatatcctatcaatcggggtaacattgatcggtgaaacctttattgatgaatcgttagatgatgataacgattatcaattcctagcgcaacgtttagaaatgtgctggcaaggtatgaccgacgaagaaagagcagaatataattacactccgcaacaattcattgataaattaaaagtcgcctaacaattaaaaataaaatagtcacggtatgaaacgataacatgccgtgactattagcttgctaagtaccggggcggtaatgagactcattctcatctagagtctccctgggcacacctccatgtgtaatcttatggaatttggcaaaagtcaatttagcgctatttacgggctgactgcttgagcacgctttgccacagaggatcagttttgataagattattgatgtactctatagcatcgttaaacgccataaatccctctggtatctccgaagacttaggaaaaacttgtaacatctcctgcgtgacgcccatcttctcaagttcttcttgggttatactaaactgcccgaattctttcatgaacttctcctgtcaactggtttatcacccgattcactcatgcgaaacttccgacgacttacccgagatccgtccgcccactcccgctcgaactccgcccgtttctccgaaaacctccgctccctttccgcaaactcccggcgaacctccgcaatatactcgcgatgcctgttgattgccgcagccgtcccgaaaatacccgcaagcaccccgacgatgaagacaattaccattacaaacattatttatccccccgcagcttacgttcaattctcgcaaggtgattgtcgattacacacatgcctaggataataaccactagtaaaacaataatcacaacttccattaaagccaccccgccatagctgctaaccaaaacaatacaaaaataagaaagaggactgttccgaatccgaaactatttatccaactttcgtacacttctccgcgcctgttctttcttctgttgtcgtctgacatgtctatcttgctcccttaattgtggtatttgaaatattctagcaattgcacgaaccataacgactgtcccgataagatccattacttcatcaaagccggattcttctagtatgaaggatgtacccattacatcttccatcgtatcttgtatgacatcttgtatgatttcgttaattgcatcatgaactgctttagccctaggattcatttctagtggtagaggctcctgaaagggcttatcatcttcttgcatagtgtttgctaccagtgacccatccagaaaataaaaaaatttgtttacttggatgcctttttaatttatacttatattatataaaaataaagacttgttgacaagtgaaattttgagattttatgagcttcttcgcaggaaaatatacagatggaaaaacagtcctatctttaaatagggctagtggaggagacgtcaacgttcattacagtcccaacacaaactccatcttccattcagatatgccccacatgtttgttaaacgccgttttcaggtgggtttagggaacgcaggtaacggttactttactggagctttaccatctgacctcagctatcttctagcaaacagggcaaacgtaattcttccagtcctagtagtacgagataatgctgatggtacagaatactaccatcagatgacaggtattcagaggaatagcacctatagatggcgtaacctttatgagaatattagtatctggggtcaatatactggatctattcaatttgacttgaaccttgaatggggttactggaaacagggtggtgctgtctgggatcagattggtaactatggtactggtggacatattatattcgaccacgaaggtggtgaagactatgttgctgatgcttactatgacctggcgggtggttggattatgtaccaatggcgtgacccacaggattggtatatgtatactaactggataccacgtgctcaaagccgtcctatcatgaactatgaagatagtcagaacctagtaaaccctgattacatgcacccacttgggccttctagtagtgtttatgacgccgtgtatgttagagcgggcggtgctagatgtgctacgggtatgggtgatccaaactcctatggtaatacggcttttactaagtatagagatcttgatttcccttaccagattccaatggctaactccagttctgcttacatgactgctggtgccgaacgtcatgttgccaatgggcgtatgtctggatttagtgaggtttactacccattcactccagttcgtatggaatacctatggttgaatgttacgtttgataactactggggttactcagctgaaaatctatttactggtaatgacatcaaaattgcaaaagattcctttataattaaaggagttgatttaagaaataccaactacgaaatgttggcagctgttagtaccggtactcctagtattagtaatacttacttctctagtaacgtgtttgcctggtcatctacagaaatggatgatggtggtgctttcagattctttggtgctaatgcctggggtggtttgaaaggatttactggaagtaatacaggtagtacggtaggtaactcaacaccatggaatattggattataccgacttccacaaaacagtaatatcgagattaactctccacagaataaaatagctattaatggtgtggatatctggagtcctaatgtaaggcctctacaattatttactcagaataaagctaataatattattcttggagacaatggtagactgtatcctatggcgtatggggaaaccagactaataaacacagttgatgttggtttaggtggtagtcccgaaccttctacgattctcctaagtattgaatggatgggtaactctctatgtgatactgatggtgacgtaaacatgcagcgtattggtaacaatgctgctagtggtgcaggtagtggcccatatgtaggtgctgctagacgtttgactaagtatgattacgatgcaggtgatggtgtttctcaccaaattgtagtattacatacaaatacctttgtacctattctaactactaatactatttcatatgctggaggtgcagctggtgctcctcgaaacaaattccaatattatatcagaaagaacgcttccaatattctagagttctgggtaacttctagagcattgccaatgagcggtctgtctgtttcatatactccgtgggttcaataccacaaactaagacttaatattcagaggttaacataatggcaaatgatgttttagtacctgatcttatgtcccctgaaggcatggatgtaatcgaggcttatttacaatgcggtagcgatgtacgcatggctgcccgtagtcttggtatgtcggaaattgcattcagggatattatgaatcgtggagaagttaagaactatctcaacgatatctttatggaaagtggattccgcaaccgtgacaagttgtttggggttcttgatgaagttatcaagcgtaagctggaagaacttgaagaaactggtatgggatctgatcaggatatcatggatattctgtggaaagcccataaaatgaagatggaagaaatgaagatgatggtagagctggagaaggcaagagctgctactcgtgctcctactaatcagactaatattcagaataatattattgctggctctggtgatcagaactacatggacttaattacctcgctagcaacgggaggtaaaaggtaatggaggtctcaagaccgtatattaacactacggatgttattgactttggtatagacaaacgtttctttcgtctgccagtctctagcatcctagctcaagaggggattacacctaatgcccctcaggtggcaattattaatgctctggaagatcctagacatcgtttcgtaacagcgtgtgtatcacgtcgtgtaggtaagtcattcatcgcatacacattgggcttcttgaaacttctggaacccaatgtgaaggtgcttgtagttgcacctaactactcacttgcaaacattggttggtcacagattcgaggtcttattaagaagtatggattgcagactgaacgtgagaacgccaaagataaagaaattgaactggccaatggttccctgttcaaactagcttctgcggcgcaagctgactccgcagttggacgttcgtatgatttcattatctttgacgaagcagcgatttccgatgttggtggcgcagcgtttgacattcagctccgtcctaccctagataaaccaaactctaaagctctatttatctctacacctcgtggtggtaactggttcaaagagttctacgagaaaggatttaacgaaacgttgcctaattgggtatctattcatggtacatatcgtgataatccacgtgctgacctaaacgatatcgaggaagctcgtcgtactgttagtaaaaactatttccgccaagaatatgaggctgacttctccgtattcgaaggtcagatctttgacaccttcaatgctattgagcatgttaaagacctcaaaggtatgcgtcacttctttaaagatgatgaagcattcgaaacgttacttggtattgacgttggttaccgcgaccctacagctgttcttactatcaaatatcactacgatactgatatctattacgtactggaagagtatcaacaggcagagaaaactactgcccaacatgctgcttacatccagcattgtatagatcgttataacgttgatcgtatatttgtggactccgctgctgctcagttccgccaggacttggcatatgagcatgagattgcttccgcacctgctaagaaatctgtcctagatggtttggcgtgcctacaagcactcttccagcagggtaagatcattgtagatgcttcatgtacctcactgattcatgcactggccaactacaaatgggatttccaagaaggtgaagaaaaattatcacgtgaaaaaccacgtcatgatgcgagttcacacctttgtgacgccctgcgttatggaatttactcaatttcccgtgggaaataaataagtataggatgggatactactcagttggtatcccattcctgcattttaaaatcccctttacaaattcgacatgattatgtatactatattcatacagttgaggagaatactgtggcgagtaatgtaaaatacaaacgtgatgcaatatcactcatgcgagacggcataaaaagtcaatataaaaaagccgcttgctgcgaaatctgtggttgtgaagaagaattagagcttcatcattaccatacagtgtctctactagttaaaaaatttgctaaagaactccagttggatttcactgacgaagaaacagtcctctcaaataggacggcattctatgaaagatataggcatgagctagtagatgacactgttaccctttgtgtccaccatcaccaactattacataaggtgtacactaaagaacctccccttttctctgcaaataagcagaagggatgggttcttaaacaaaaggaaaagttacagaatcctcacaaagagacacaagtcaagactgaaactaaatcaggattcgcaaggttcttataatgggtttaaaaagctggattactgaaaagctaaatccgggtcaacgtattataagagacatggaaccagttagtcatcgtactaaccgaaagccttttaccacaggtcaagcctacagtaagattgagattctcaaccgaactgctaacatggttattgatagtgcggctgagtgttcttacactgtcggagcaaaatataatattgtcacgtacgctaatggcgtcaaggcaaagactctagacactctcttaaatgtacgacctaatccattcatggatataagcacattccgtagacttgtagtcactgacctactttttgaaggttgtgcatacatctattgggatggcacagcactttaccatgtcccggctgctcttatgcaggtcgaggcagatgccaataagtttatcaaaaaatttatatttaataatcagatagattatcgcgtagatgagattatctttataaaggataacagttacgtgtgtggcacaaactctcaaatttctggacaatctcgtgttgctactgttattgactctcttgagaagcgttctaaaatgcttaactttaaagagaagttcctagacaatggtacagtgattggtcttattcttgagacggatgaaatcctgaacaagaaattgcgtgagcgtaaacaagaagaattacaactcgattataatcctagtacgggtcagtctactgtcctgattctagatggtggtatgaaagcaaaaccgtactcccaaatatcctcatttaaagatctagactttaaagacgacattgaacgtttcgataagagcgtctgtctggcttttggtgttccgcaagttctgattgatggtggtaataacgctaatattcgaccaaacatcgaattgttctactacatgacaatcgttcctatgctgaacaaactgactagttctcttactttcttctttggttacaagattactcctgatactaaggaagtagttgcgttaactccagataaggaagctgaggctaaacatttaacctctctggttaataacggtatcatgactggtaacgaagctcgtatggagctgaaccttgaacctttagatgatgagcagatgaataagattcgtattcctgctaacgttgctggttctgctacaggtgtatctggtcaagaaggtggtagaccgcaaggttccgccgaaggggatgaagaatgattgattatgatggtctgaaggccatttttggtgagaagttaccagaatctcatatcttctttgctacggttgcagcacacaagtttgttccaaactatgctactctacgtaaagagttcggaatgaccactgcacataccaaccgcaaggtttggaataagttcaaagaagcttacgaaactactgctccggctgtcccggctctagctttcacaaagaatctggctaaaactctagctgttgaagaaggcgcggcaattaatctaggtgttacggttactggtggtactacaccatacacgtatgcatggactaaagatggttcaccactaagtggtgctaccggccctaacttcaataaagcgaccgcggctgcagaagatgcaggtacttacaaagtcgtagtaacggatagtaaagctactgccattacttctaacgagtgtgtagctactgttaaccctgctgctggaggctaataaatgacaaatgctgcgattgactataacaagttaaaatcagcaccggttcatttagacgcttacgttaagtctattgatagcgagtccgaaggtgtcgttaagatccgaggattcgctaatacaattagtaaagatcgcgctggtgacgtgattcctgcttcggcatggaaaacgtcaaatgcacttactaactacatgaaaaacccgattattcttttcggccacgaccatcgtcgtccaatcggtaagtgtattgatcttaatcctacagaaatgggacttgagattgaatgtgaagtttatgaagcttccgaccctgcgattttctcactaattaaaaacggtgtactgaaaacttttagtattggattccgctgcctagatgcagaatgggatgaagctactgatatttttattattaaagatttagaactatacgaagtctcggtagtttctgtaccgtgtaaccaagactctacttttaacctagctaagagtatgaatggtcatgattacactgaatggcgtaaatcttttactgcaacaagttctaaagctgtcccagctcaagaacgtaatctttctgaactagaaaaacttgcgatagctttaggctacgttaaagaataacggagaattatttaaaaatgactattgatattaataagctgaaggaagaacttggtctgggtgatctggctaaatctctggaaggtctgactgctgctcagaaagctgcggaagctaagcgtctgcgtgaagagcaggaagaaaaagaattggctcgtatgaatgacctggtttctaaggctgtcggtgaagatcgtaagaagctggaagaagcactggatctggttaaatctctggatgaaaaatctaagaagagcgcagaactgtttgcacagactgtagagaagcagcaggaaacaatcgttggtcttcaggacgaaatcaagtctctgttggcagctcgtgaaggtcgttccttcgttggtgatagcgtagctaaagctctttatggcactcaggatgctttcgaagatgaagttgagaaactggttcttctgtcttatatgatggagaaggacgtattcgaaactgaacacggtaaggctcacgttaaagctgtaaacggttcttcttccgtttccatgtctagcgaagcgtacgaaactatcttctctactcgtattatccgtgacttgcagaaggaactggtagtcggtgcactgttcgatgaactgccaatgtccagcaaaatccttactatgctggttgaaccagaagctggtcgtgctacttgggtagacgcttctaaattcggtactgatgaaactgttggtgatgaagttaagggtcaattgactgaaattagcttcaaaacttacaagctggctgctaagtccttcatcactgatgaaactgaagaagatgctatcttctccctgctgcctctgctgcgtaagcgtctgatcgaagcacacgctgtttctatcgaagaagccttcatgaacggtactggtactggtcagcctaagggtcttctgaaactggctgctgatgacactgctaaggttatcaccgaagctaaagctgacggttccgtactggtaactgctaaaactatctctaagctgcgtcgtaaactgggccgtcacggtctgaagctttctaagctggtactgatcgtatctatggatgcttattacgatctgctggaagatgaagaatggcaggatgttgctcaggttggtaacgatgctgttaaactgcagggtcaggttggtcgtatttatggtctgccagttgtagtttctgaatacttcccagctaaggctgcttctgcagaattcgcagtaatcgtctacaaggacaacttcgtaatgccacgtcagcgtgctgttactgttgaacgtgagcgccaagctggcaaacagcgtgacgcatactacgttactcagcgtgttaacctgcaacgttactttgagaacggcgttgtatctggtgcttacgctgcatcttaatacaggcttttcagccgataaggagagcttcggctctccttttttattgggaaaaataaatgcaaatcatcactgttgaagattacagactatatgctaatgcaaaacgtcctgaaattgaaactcaagtagatatgatgattaaagctgccaatacgctgattactagccttttaggtatggacgacgcggatgcggtagatcaattaatcactactaaacctagccgtaggaaatactttttgagttctccttctgctacatcagttacaaagatgactattaatgagaatgaaatagacccggaacagtacaaactgtatccagatggtgttattctccttaagtttagtccaccagaagggtatatggatgtagaatatacacaaggtggtttcaacccaatgcctgaagatctcaagttggctgcatgtctattagtggatcactggcataagcaagattatcgtcaagccaagactattggtggtgaaacagtaacgtttaacaatactaagtcaggtattcctgagcatattcgtactatcatcgaagtctacaggagagtataatgtctctttctgatttagctagacagattattaaagagcagctagatacagcaggacgatctgaaaataataagaacactgttgtgtacactgttgagactgggcttaaagatccaaaaagagatggtactgttgcgcaagtatcattcaaattctctaagcctgtatcacaggacttattaaatgttagaacagcctctatcttaaaggctgtttccgctaacttagatctttctggtgacttaggcgctctagaaaacctcatacaagccacggcaggaaaaagatccgccgttggtaagaaacgttcaactggtagggttcaggtaaactttggtgatcctagagatactgaagatggttattcaggtgcagttacaggtgcagcaggacgatttgtttcaaatagtaatatgaaagctatactagaaatagtagctaaagaatatcttattaaggatatgaagaaagcaggagcacctttgaagtttagaactggtcgcttcgccaactcccttaaaattaaagatgttatgttacgtgacgctgaaacaagccgtagtgctcctgaacttaatgtgacctataattatatggttagaccttactcagtattcaaccccgcagtatctacctatcgcagactatctttacgtccctaccctggagcaagaaatccacaaaaacttattggggaagcgatagctaaagctgcaagagacctgattcactctagatataaaatcaaggttaatcaaggaacctaataaatggatcacagaacaagtattgcacaagcgctggttgaccgaatctccacacaaatggacggatctcagccagatgagtattttaacaacctttatggaaacgtttctcgtcaaacttatagatttgaggagatccgagaatttccttatgtggcagttcatataggaactgaaactgggcagtatcttccttcaggtcaacagtggatgtttttagaacttccaattctggtctatgacaaagaagaaacagatattcaagagcaacttgaaaaactcgtagctgacataaaaaccgtcattgacacaggtggaaatttagaatatactgttagtaaacctaatggatcgaccttcccatgcgaggcaactgatatgagcatcacgtcagttagtacagatgagggtctactggccccatatggtttagcggaaataaatgtaacagtgcgctatatgccacctaagcgtgcattacgcagataagttacagattaggagaatataaataaatgtctttacaactattacgtaatactcgaatcttcgtgtctacggttaagactggtcataccaaagaaaacacgcaagagattctagttcaagatgatatttcttggggtcaggacagtaactcaaccgatattactgttaacgaagctggtccgcgtccaactcgtggttcaaaacgtttcaacgactccttgaacgctgctgagtggagcttttctacttacatcctgccttacgtagataaaactactagtaagcagatcgttccagactacatgttatggcatgcgctttctagtggtaagcctatcgatctcgatggcgatactggggctcatactaacgaaactaacttcatggttaactttaaggataacgcataccacgaactggctatgttgcacatctatatccttaccgataaagcctggagttacattgattcctgtcagatcaaccaagccgaagtaaacgtagatatcgaagatattggtcgcgtaacctggtctggtaatggtaaccagctgattccactggattcacagccatttgaccctgatactgtaggtattgatgatgaaacttacatgactatccaaagttcttatattaagaacaaactgactatcctgaagattaaggatatggacagtggtaaggcatatgatattccgatcactggtggtagcttcacaatcaacaacaacatcacctatctgactccgaatatcatgtcccgtgtaaacattccaatcggttcctttactggtgcattcgaactaaccggttctcttactgcttatctgaacgataaggctctgggttctatggatttgtacaaagatctgattaagaccctgaaagtagttaaccgtttcgaaattgccctggttcttggcggtgagtacgatgatgagcgccctgccgctgttctagttgctaagcaagcccacgttaacatcccaactatcgagactgacgatgtacttggtacttctgttgaattcaaggctatccctaccgatctggatacaggtgatgaaggttatcttggtttctctaataagtataccaaaactactatcgctaacctgattgctacaggtgatggtggtcaagctgctccggttccagttactggcattactgttaagtctgctggtgacgcaaccacagttgaaaatagtgcaactctccagatgacagtagatgttctgcctgcagaagctactaataaggccgtaacttggtctatctcttctggtacagcggctactattgatgttgactccggtctgctaactgctgacgcttctaaagtaggtgcagttactgttaaagctgtggctaaagacggttctggtgtagaaggtactaagagcattacagttactgcttctggtggctaattaaatgtactactctctaatgcgagagtcaaaagttatagttgagtatgatggcagagcgtatcactttgacgctctgtcaaactatgatatcaatacttcctacgaggaatttaaaactcttcgtaggactattcatcgtagaaccaactatgctgactctgttattaacgcacaaactccatcatcaatatcgctggctataaattttagtaatacccttactgaggctaacttctttgaatggatgggctttgatagagagggtactaccttcctgctaccactttatagcacgaatattgaaccaacaatgtttaatatatacatagttaataaagacaataactgtgtatactttgaaaactgttttgtatctaacgttgacttctctcttgataaaaacgttccagtgctgaatgttggtattgagtctggtaagttttctgaggtatctacgtatcctcctgctggtattgttcagggcgaggttatgtcttatagtcctcctagagtaactacaaacagtaatattttacctgctcttttatctgcttctatgtccttccaacagcaatgctcttggagagaagataaaagtgtatttgacataaacaaaatatataataataaaagagcttatgttaacgagatgaatgcttcggcaacaattgcgttttactacactaagcgatttgctggtgatatgttctacaatattgaacccgaaactgatatccctttaactatccgaaatgaacatatttcgattgatttcccttcagcacgtataacaaaacgcctacaattctcggatctatacaggattgagtgggatgtaattcctactgctgattctgatccggtaagaatcgacttctttggagaaataaagaaatgattaacttaaaagatattaccctagatactcgctctgttacgctttcctaccctggtatgcctaactttaagcttgaattgaactacatgtctcgtgccacttctaagcgtgttattgcttctgcaaaacgtgacgaatgggttaatggtacactgttacaggttcaggatgatgacaagttcattgaagctttcgttgattctgctatcaaaggttggactggtctgactattggtgatgttgagaagctgatgctgattgaaactgaagctgatccatctactgaagttccttttagccgcgataatgctgtaatgctaatgcagaactctgctgcgtttgattcctggatcaaccagacagtgttccacttagacacttttcgtagcccaaaagcgtaaacaacttctagatgccgttgccaaattcgcagataaatgcgtcaagtcttcggcatctaaaatgactaaagaacaatacctaataatgtgcgagtcaatgggtatcgaaccagatcctgatgtgatgcctgttgaactcgaagattttccacctatcgtatctactagtatgcaaatttataacagtcttattgattgtttcataccgggtgactttcctatctttataggtaaagacaaaagtgcgttgggtgttttatttgatatctatgggatcacggatccgatagagaaagagttcgttctacatatcatcaatatatttgattcgaaagcagtagacgcagctcgtaagagagccgagaaacatgggaaacagaatggtcgcactccgaacatcaaacctcatggaagatctcgagctcagtaaaagtttcctccaatgggcgttccacgatgaggcttggctctgggtgatttgcccagagccttttttattgggaaaaataaatgactgataagctaatacgagaactactgatagatgtaaagcagaaaggggctacccgtactgcaaaatctattgaaagtgtttctgatgcgttagagaatgctgctgccgcttctgaactgactaatgaacagttaggaaagatgcccaaaactctttattccattgagagggcggcggatagagcagctaagagtctaacgaagatgcaagcaagtaggggtatggcaagtattaccacctctatggctaaaattgaaacgaaactagatgacctagctttagcaatgattgaagttgctgataaaatggaaacaggttttgagggcgtatctaaatcagtaaaagttatgggtaacgatgttgcagctgcaactgagaaagtccaggataggttatatgatacgaacagagctttatctggtacatctagaggctttaatgatactactacagcagcaggaagagctagccgagcaattggtaatacttctggttcagctcgtggtgcaactcgtgacttcgcagctatggctaaagtaggtggtagtttacctctaatgtatgctgcaattgcatctaacgtgttcgttctgcaatctgcgtttgaacagctgaagatgggtgatcagttgaaccgtctagagaagtttggtactatcgttggtactcaaacgggtactcctgtacaaaccctagctaggtctctacaagaagctgctggttatgcaatttcttttgaagaagcaatgagacaagcatcctctgcttctgcatacggttttgatgctgaacaacttaataaatttggtctagtagctcgtcgtgctgctgctgttcttggtgtagatatgactgatgcacttaaccgtgtaatcaaaggtgtatctaaacaagaaatcgaacttctggatgaacttggtgttactattcgtcttaatgatgcgttctctgactatgttaaacagcttaacgctgctaacacaggtattacttataatatcaatagtctatccaccttccagaagcagcaagcatatgctaacgcagtaatcgcagaatctactaaacgtttcggatatctggatgaagtattacgtgcaactccgtgggaacagttcgctgctaacgctgatgctgcattacgtaaaattcaacaagctgctgctaagtatcttggtccagttattgactctattaatgcagtattctatacatctcaagcttctatttctgcaactgctgctagagcacaggaacagactaacagagctattgatcctagtaacgttggcgctgtggctctggggcttgaggcatcagaagccggatataataaagctcttgatatgtataaagaatccctagaaaagcgtaataagttaaaagctgatctagataagcgcatgcaacaggccgacttctttactgctggtgcaattcgttctgtagctcaaggtgttcctgtaagtgcagcagcacttggtgcttccgaagaaaacaagaagttcgttgctgatactgctgcaatggcactacaggtagagcgtcttgataaggaagttgctgactctactgaaaacttaggagcctggaaatctgcgtatcaagctgctggagcagctgctgctaaggcaaatcctgaattccagaagcagattaatctacagaaggatgcaaatgatcctgatgcagtttatgactttaactcggcaaccctgaaagggcttacggaacaacagaaagcatataaccagactaagaaaactgcaagtgacttagcaaacgatattcagaacattgctcagaatactaacactgctgctaagactagcgcatcgttggctgatacaattaagactatcgaatcactatctgccggtactggtaagaatgctgatgagtatgttaagagtttgaacttaggttataatactctaagtgaaatgaaaactgcttctcaagcgcttgctggttacgtaaaactgactggtaacgaaactaaaaatcagttagcggttcaacagaagattgccgaagtgtacaatcagactaaggataaagaaaaagcacaggaagctggtagacgtctggaggttcaacagttagaagaacaggaagcagctcttaagcgtgtactggaaactaacaaaggtaacaaggcgattgagggtgagattgctaagatccagttagaaaggatcaagatcactaaccagaacatggaagctcagaagaaggtcaaggactacacggataagatccttggtgttgatcgtgagattgctctgcttaacaaccgtactatgacagatactcaatataagttagcccagttgaaccttgaactgactatcgagaaagagaaatacgcatggtactctaagcaggtcgacaaacaaaaagatgcagaacaatcaagacgtgctcaggcacagattgaacgtgaaatctggaagttccgtcaagaccagcagatggaaatggctagtgggcgcgagagagctttaggattatctcaaaccgaacgtaacgttactggtgaatctcagcgtttaactgaacagcaagctctgtaccaaagtctattggagattacaaaaggaaacgctcaagctcaggaagagtacaagcgtaaaatccaagaaacttcggcagctctagcacaactcaagatgcaacgtgatgctcagatgcagcaagctgttacttcttctgttggtggtacttacacacctactactggactagaaggtgatgataaagccaatatggatatgcagaatagaatggcatcttatgaccaggctatctctaaactatctgaactaaactctgaagcaactgcagtagcacaaagtatgggtaacctaactaatgctatgattcagttctctcaggggtcactggataccacatctttagtagctgctggtatgcaaactgtgtcttcaatgattcagtacagtgttggtcagcaagtaagtgctattgatcaggctattgcagcagaacagaagcgtgatggtaaatctgaggcatctaaagcgaagatcaagaagttagaagctgaaaagcttaagatccagcaagatgcagctaagaagcaaattatcattcaaacagcggttgcagttatgcaggcggctactgcagtaccatatccattctcaattccgttaatggttgcggctggattagcaggtgctatggcattagctcaggcatcttctgcatctggtatgtctaatattggagactctggtggtgatactgctagctacttaacacttggagagcgccagaagaacgtcgacgtttctatgtcggctaatgctggggaactttcttatatgcgtggtgatcaaggtattggtaacgctaacacctttgttccgcgtgcggaaggtggtaatatgtatccaggcgttagctaccagatgggcgaacatggtaccgaggtagttactcctatggttcctatgaaggccactccagctgatgaggttaaaggctcatctagaggcacatcgggtagacctattgtgctgaacatcagtacgatggatgcggcgagcttccgagattttgcttcgagcaacagcgctgctttcagggatgccgtagaacaggctcttaatgagaatggaaccaccctgaaatcacttggtaattcttaatattggaggaggactttatgtcctccttttctttatggaaaaataaaaatttcttgataaaattttccaatcctattataatattgttattaagaggagaaattaactatgagactaccagacccatacacgaacccagaactatcagggttaggttttgaaagcgttaacttagtagacaatgaccctatgattcgtgatgaattacctaatggtactgttagggagattaaggtgtctgctcaatattggggtattaatatctcttatccagaattattcccagatgagtttgcaaaattagactcatttatacttgattataaaagaacgggtgattatattgatgttttattgcctcaatatgaagcttttagagtccgtggtgacactagtgctgtgaatattccggctggtcaaaaaggttccactattatgatggataccaaagggacactacgtggattacctaagcctggagatttgtttaaactctctaatcaccctaaagtatataaaatcacttctattactacagcaggtaactcatggaatctgagtatttatcctgatctattcattactactacaggtagtgaaaagccagtattcaatggtattttattcagaactaaacttatgaatggagacagttttggttctacgttaaataataacggtacttattctggtatttcactttccttgagggaaagtctatgaagaaaattcttgacacagctagagagtatttaagatcacacaataaaataaaaacagcgtgtcttattactcttgagcttcctagctctactggatctagtgcttcttatatctatctaactgactacttcagggatgtggtatatagtggcatactatatagatctggtaaagttaagtctataacaacacataaacaaaatagagatctttccgttggtagcctttcatttactattaccggtacagccgaggatgaagtattaaagctcgttcaaaatggtgtatccttcctagatagaactatctcaatccaccaagctgttattgatgaagatggtaacattcttcctgtagatccggaaacaaatggacctcttctatacttccgtggtaagattactggcggaggtatcaaagataacgtagctacttccggtattagtacttcagtaattacgtggaactgttcaaatcagttctacgatttcgatcgagtaaacggtcgttatactgacgatgctgatcaccgtggtctagagattgttgctggtgagttagtaccttcaaatggtgcaaaacgtcctgagtatcaggaagactatggctttttccactctaacaagagtgtttccttcttggctaagtatcaggtgcaggaagaaagatataagttacagtctaagaaaaagttattcggtctatcaagaagttatagtcttaagaaatattatgagaccgtaactaaagaagtggatcttgactttaaccttgcagccaaattccttccagtagtatatggagtgcagaaaataccggggcttccagtatttgcagatactgagttaaataatccaaacattgtttatgttgtatatgcattctgtgaaggtgaaattgatggatttctagatttctacttcggcgatgtccctatgatctgtatcgatgcaaatgatagtacagctcgtacttgtttcggtactaagaaaacagcaggtgacacgatgcaacgtatcgcatctggtatgtcaacttctgaaccttctgtacatggtcaggaatataagtataacgatggcaacggtgatatcagaatttggacttatcatggtaaagctgaccagactgcttctgaagtactagtaaacattgccaaagagaaaggtttctaccttcaaaacagttatggtaatggccctgagtactgggatgaacgatataagcttctggatactgcatatgcagtcgttcgttttactattaatgagaatagaactgagattccagaagttagtgcagaagttcaaggtaaaaaggttaagatctatcatccagatggtagtgtggttgctaatgctactagtttgaatggtatctggcagactctggactacttaacttcagatcgttacggtgctaatatcactatcgatcagtttccattgactcagttaatccaagaagcttcgattctagatataattgatgaatcctatcagcaatcttggcagccatattggagatacactggctggactgatatgtctaaagataatagacagatagttcagatgaacaccatagtagatactgctgaatctgtatttaagaacgtgcaaggtctccttgagtcctatggtggtgcaattaataacctgtcaggtcagtatagaataacagttgaaaagtattcaagtactccgctggagattaacttcctagacacctatggtgacttagaactatcagatacaactggtcgaaacaagtttaactctgtccaggcgtctatcctagatcctgcactaagttggaaaactaactcaattacgttctttaactccgtgtttaaagaacaagataagggactagataagaagttacaactatccttcgcaaatattactaactactacactgcacgtagttttgctgatagagagctgaagaagtctcgctattctagaactttatcattttctctaccctaccactttattggtattgagcctaatgatcctattgcatttacgtatgatcgttatggctgggaaaagaaatatttcctagtggatgaagttgaaaactctagagaaggcaagattaatattactctacaagagtacggagaagatgtattcattaactctgagcaggtagataatagtggtaatgatattcctgatgtaagcaataacgttctccctccaagggactttatttacacaccaactccgggcggtactgttggagctattggtaagaacggtgagttgtcttggctacctagcctaacaaataacgttgtttactattctattgttcactccggccatgctgatccgtatatcgtacagcagctagagactaatccaaatgctaggatgatccaagaaattgttggagaacctgctggattggcaatcttcgagattcgagcagtagatatcaatggtagacgaagttcgccagtaacgttatcagtagaactaaactctgctaaaaacttaagtgttgttagcaactttagagttattaatactgcttcgggagatgcatcggaatttgtaggaccagatgttaaactggcctgggataggattccagaagaggacattattgaaggaatctactacactctcgaaatctacgataatctagatcgtttattaagaagtgtcagaatagaagatcaatatgtttatgattatctactgatatataataaggcagactatgcttcgctaaacgaagatgctctaggaattaacaggaagttacgtttccgtatacgagcagagggtgataatggcgagcaatctgtggattgggcatctatttaaatgatttcgaataatgcaccagccaagatggtcttaaatagtattatgactggatatacccttgcgtatatccagcattctatctacaccgactacgacgttatcggtagatcattctggctaaagcttggcgaagaagtagagagacgagattatactggtatcgatactttctttgtcatgatcaacaatttaactccctcatccacttatcaggttcagggagctttctatgactcgattatagatgaagaacttcttgaagcaaaaattggtattaatctctccaatgaaactaattttaaaacaaaagagagacctatcattactgctgcaagatcagaatcagaacctgttgacgtaggtgttggtgctccaatagttgtcgtagaaacttctggagaagctagttattgcactattgaattaaaaagcactgcatcagaggatagtgaatgggttaaatattacataggtgcactaggaactactatcaaatttggtggtgttcctgttggcgactataagatcagaatatctggtcaagttacgatgccggatggtgttacagttgattcatctggttattatgaatatcctagcgttttcactgtagcttataatttcgtaccacctactgctccaactaacattcggtttaaagctgctagaattgcagacggtaaagaacgttatgatgttagaattgagtgggattggttaaaaggtggtggttctaacgttcgtgagttcttagttacttatatagattctgcggaatttgctagaactggatggactaaagcccaaaagataaacgtgggtgctgcccaagctgcaacgattgtttcattcccatggaaagttgatcatacctttaaggttgcatcgattgcctggggccctgataaacaagatattacagaatctgctcctgtaacattcatactaaatgaagatactccacttgataacagctttgttaatgaaacgggtattgaagttaactatgcgtacattaaaggtaaacttaatgacaatggtacatggaagcaaacattcttaattgatgctgcaactggtgctattaacattggtctgctagacgaagaaggtaaagctccaatctcctttgatcctataaaccgtgttgttaacgttgatggtaaagtaattactagagatattaatgctgcaaactttattatgactaacttgtctggtaaggataatcctgcaatctacactcaaggcaaatcttggggggataataactctggtatctggatggggatggataatgcctcagccaaagcaaaattagacattggtaatgccacacagtggattcgttatgatggtgatgttttacgtatctctagtggggtagttattggaacgcctaatggtgatgttgatatcggaactggtttgcagggtaagcaaacagtatttgtttataagttagcaacctcacttcctgcaaaaccgttagaacaagactatccacctcctggctggtcaaaaactccacctaatcgtacagatatgactcaaaatatctatgcgactacaggtacacttgatccagttactaataaactgctcgcaggtactagttggtcagatgtagttcaatggagtggtactgagggtactatcggtcatgatgggcagcgcggtcctgggatgtattccttaggtattcctggtcttggtggttgggatgatggacaagctaatgctttcttccaaaacaactttggtagtccacctgttagatatgatgtactgactgagtttaatagtaatgctccacaatcagcatttactcgtcaatggaatggatccggttgggttagtcctgcaatggtgctacatggcgatatgattgttaatggtactataaccgccagcaagattgtagcaaataatgccttcttatctcagattggtgttaacgttatctatgatagaaacgcggcgttgtctgataacccggaagcctactacagaatgaagatagacctagcaactgggtatatccatataaggtaaaataatgagtacagaaaatagagtaattgatattgttgttgatgagaaagtaccgtatggtcttatcatgcaatttatggatgttgatgatagtgtctatcctccaactgaagttcctgtaaacttaacaggatattcgcttcgtggaactattaagataagtcttgatgaagatgctgagactctagcaacctttaaaactcgtgtaattgatgctgctcaaggagccgctgctattagtctttcaatttccgacgttaccaatattggtaataaagcatctaaagaacgtgataaatataacccaagacaacgtttcgctggttactatgacattctaatgactcgtgatgttattggctcagaagtcagttcattccgtatcatggaaggtaaagtctacatcagtgatggagtaactcaataatggcaatcagaactaaaattattgtacagcagattctgaacatagatgataccacaactactgctagtaagtatcctaagtatacagtagttttaggtaactctattagttctattactgctggtgaattaactgcggctgtggaagcatccgcagcttcagctgctgctgcaaaagattctgaaattgcagcgaaagaatcggaaacaaatgctaaggactcagaaaacctagctgctatctatgctgattcctcacaaacttcagcaactcaatctgcggcatctgctgctgaggctgaaagacaagcgggtctatcacaaaagagtgccgaagcatctgctacatctgcggaagaatccaaaggatttagagattctgctgaattagctgctcaaaatgctgaaactagtcgtagacttgcggaacaggctaaaactgctgcgcaacaggctcagacagccgcagaaactgctaagactggtgctgaaacagcaaaagcaggagcagaagctgctgctacaacagctggagaacacgctgctgctgctaagcaatcagaactaaatgctaaagaatcagaaactaatgctgctggttctgctgtagaagctggagataaagctgtagatgctactgctgaggcagatcgtgctaaagccgaagcagatcgtgcaactcaggttgttgatggtaaacttgataaagtagatatttctggttttatcaaggtttataagactaaagcagaagctgatgctgatgttgcaaaccgagttctagatgaaaaagttttagtttggaatcaaactgattcaaaatatggttggtataaggtagctggtacagctgaagctcctattttagagctagtagaaattgaacagaaacttgtatcaatcaacaacgttcatgcggatgatgctggtaacgtgcagatcacccttcccggtggtaacccttctttatggctaggtgaagttacttggttcccttatgataaagattctggtgttgggtatcctggtgttttacctgctgatggtcgtgaagtacttcgtgtagactatccagatacttgggaagctatcgaagctggcctaattccttctgtttcagaagctgaatggcaagctggtgcaactctctacttctccactggtgatggttctactacattccgtttacctgatatgatgcaaggacaagcattccgtgcaccaactaagggcgaagaagacgctggtgctattaaggaacagatcccatatatcactaccgtgaacggaattggtcctgctgatgatactggtgctattaagctaccttacgtagcaatggtcaacggaaatattatacctgatgaaaacggaaacctttctctaggtaatgttgttactaagaacgtttgggacggtattaacggtgaggtcttgcttcgtggtgcttttgggttaggtggtacaggtcttgcgctaaatgagcctgacttagtatctttctttaaagcatgtagagcttttggttctggatactataggaatgacacagcaatagaggggctaccagcatattctgcgggattttactctaagactgctgatactcactcatttatttgtcctcagtactctagtggtgttgtttttgttggtactattaatgacaatcagttagatggtgaatctcctacagtacatactaatattctttatggtactgctaataaacctgatttaaataatgatacccagggaactcttggtattaacaaaggaggtactggagctactacagttggtgcagctaagaaagctttggaagttagtggagttttctgcaatgataaccctgctggtggagcttttaactctttccaaagtcctgtaggaacccacgagattaggattactaatgatggtctctggggtttatggaagaatggagatgaagttaacgttgctcttccaataagttctgggggtactggagctacggataaaggtgctgcacttaacaactttgggttagggtattatcatacgcctagatttgcgggagtagatttatctaattatgaaaatatacctaatagtggtatccttaacttaaatagagtaaaggaatccgaccaaaatgttgttactcaaggtagaatatatcatgagatgcaatcaaacctcgcaaaaataaccctacacattaataacactcttaatggcgtaaaccgttacatacaattttccgaaactggtgatttaactggattacaggatgtgcatgctgctaactacaatgcagggaatagtgttacggctcagggatggatcaaaggtggagaaaagatctatatccaacaaacagcaggtggtaatagggaaatccatatggctgttcctggccctaataatgatccaggtgttggtagctggactaacataattcaagggaattggtatagtggatactggcaggtaggaggtattcgtgggggtggacaggacttagactgcttccgtattggagttaacaacgctggtacagattggaaagagtttaactactataactcttacggtgggcacatgaccgctcaaaggggttttcgtggtcagtgtatccaaggagcttggggcttagaatgggattacatgggtgcgcctttccatgcagcttctgtaacaagtaatgatggtgggtggtctccatttgtttctggtggtactgtatctacaggaggctacgcactacgtgttgggcttggatgtatttctaatggtaacgctgcatggcctgatgctgctcttaagttaaatggtgatggtagattccatcgttcatttacttttagacagaatggtagtatatacacttggggtaatgatccttggggtggtaactacgacattgctatgaacccttcttcagatagagatatcaaaagagatattaactatgatgatgggttagcctcttatgagaatataaagcaatttaaacctaccacatttatatataaactagataagtataaccgtgtacgccgtggtgttattgcccaagatctctaccagattgaccctgagtacgtaaaactggttcctggttctcctattatagaaacaccagaacatcattgctgtgatgaagaaactgagaacgtagaaggtaagatcattgattacaatgatgatactctagccttagatatcaatccgattgctattgatacagctttagcagttcgttacttatctattaagttcgaagaatcacaggaagaattgaaaacagtcaaggcagagctcgcagagttgaaggctctagtagctactctggtaaataagtaagagtataggggagtaattctcccctatttactaaggaaatactatgtcacgtaatttaatgcctaaatccggcgcaatggcgccttacgttgtagttaatagagatgctgcggttgctggtgttttctctgtcgatggagaagctggtgctgttgtactaacttctaaatatctacaaatttcaaagtataatactgataaagctgctactgatgctgctatcaagagtattaatgattcaatcggtaacatcaatactgcacttggcggtattaatactactttagatactaaggctgcaaaaggtgctaataacgatattacagaattaaatgcactaacaaaagctattactattgctcaaggtggtaccggagcaaaaactctagaaaatgctagagtaaatctacaagtagaacgcctgcgtcagcaagataatggaacttttgttacttctcctgatggtaaatattctttatttatctataatagtggagattttggtttaattgatagcgctactgcagcagttagtgctatgaaagttgctttcggcggcacaggtggaactactcctaaaaccgcaagaaaaagccttaatgtccctgttggtgctttggctgaaatagtaccggatggagaaaacatactaaactacgtggcagtagcaggccaaagtgggtattactcttctggagaagtagtagttaatggtccacctaaacaagaaggttggtggacatataatttccattgtcatggggttgatataaatggtgctgctcagtacggagtactacatgctgtcggactatctggtagttcttgggttaacgttcttgatggtacaggcaactggagaggttggcaggagcagtttaacgctcagactactgttcaattctctaatggaggtactggggctaactcctttgatggtgctagaactaacttaggtatcgataggtttaaacaatctgccacagagactatgatgtacgctcctggagttgggtatagaatcactgcaagacccaatggagaatgggggatgtggcgtgatgataccggtggatggattccattatctattgctgctggcggtacaggggccaacgattcctcccaagctaggaaaaaccttggattaacagaatggtttgtactaacttctatcgatcaggcatacccaaatggatttaactttgatactattagtgtaaactgtaaatatacagttcctccttcttctggctccaatattgttggtaccagacctttccaacaaatttctcactgggaagatgcatggttcttcttagagactttaatacacaatgattctaggtatagaatgcaacgtgctaccctgtttactggagcttggaagaactctgtagcggtacgtactatggataacaatacttggagtccttggatacctgttaaggatgcttttggatcccgaggtagtactgtaggtaatagagttacttttctatctgtaggtacggtatccggagatgctgctggtttaatagggggttcggtagaatcaggtagctgggatctttggagacagagagcttgtggtttactggttgaaatgcctgctagagattctgcggtaaacgtatggaaatctgttatgtggggtcaggactggcagggaggtatggactgcgttttatggagtgcgggtggtggacaaaccaacctaagggtactaggggctgaattccgctttatgagtgatggaagtgctgcagcgggtaactgggttagtacttctgatattcgtatgaaagctaatctacagaagattgagacagctcgagaaaaggttaaatccctagttgggtatacctaccataaaagaagtaacctcaaggaagataagtattctacatataatgttgaggccggtattatagctcaagatgtacagtctgtccttccagaagcagtatataagattgaaccacaaaaagaagacagtatgcttggtgtctcccatgcaggtgtcaacgctcttctagttaatgcttttaacgagcttaatgaagttgttgaaaagcagcagcaagaaattgatgaactcaagaaattggtaaaacaactacttgataagtaaaagaaaaccccagtggattgtccactggggtttattattatctgtttccagcaataatacctaaattaaacactgctaacatagctctaagcgtaggatcttgcgatttgctacatagttcaacaaaagcctcttcatcccaatggattacattaccttcattatctactttcagaactacattgtttaggttagtctcagcaaccgcaacgtgatagttctttgagtgctcaaagttagctaccatcttagggtctgaataatcgtacttatttacttcctgagcttccaaatccaccttctccacgttctgtctcctctagttcgtcaacgatttcaaaatgatgagttgagtagtgtggtagtaccactaactgacaaagtctctcgaaattttccagtgtttgaatttcagaaccgtagttaaacagattcatcttaatagtcccacgatagtctgagtcgatcacacctgcggtatttgctatcatcagatgacgcttacctaaagagctgcgaggaactaccaaaccgaaccaacctcgcggaatttccaccgcgacaccggtatcaatcataagagatttacctggtgcaatagcttttaagtctgcatttaggttagtaccaaagaacgcacgaagatccattcctgcggcatcttctgatccaatctttggcatacaatctggatgagttagtttaattttaatcattgtcctgcaatctccaaaatatctttcgtaaacttatcaagtacgtcttgacccactgcggctatagcatccacacagtaagtcggtaaatcaaccagaattaggtttcggaaaagtaactcctccgatgcgtttagattctgtatatatttttgttttcccggcaatggaagatgatcaataatatccaagacgtttccaaattctcggataatattataaccacgttttgcaccgattccttcaacgccacggatgttatcaccaagatctcccatgattgcttttagagagatgaactgatcaacatcatcaacgttgtggtgttcatacatgtcacggagatgatactcacgacgtgtagtaaaggagaagcgagaaactcgatcagtcaagagagtatcccagtcaccatcggtggagatcagccaaacgtgatcgtagagatgaccgataagcttaacaatataagctgccatatcatctgcttctactccacgaatagtaaaagttgggaatgtagtttcacacaactcgaaagcatcacgtagatattcgaagaactgttcgtctagtgctttttcttcttcggtacgctgagcatacttttcatcccggttgcctttataatcaggaagatgttcgagacggaaagcagacttccctttatcaccaagaacaatcgtagttctagcagaataagatttcgctagagattgaatcgttgatacataactagaagcaaaaggtttcttactattattatgtttaaagcggaagcctaagttagttccgtcaacaatcataagattacgacgagaagccagctcagcttcttcctcttcaataaattttccccaggatttactcattatttaattaagtcctcaacagataagtgatgtaaccacggctcaaataaaccgattacgatttccatgtctttcttatttaacaccatatgggtacgactcattaagttgtcaaccatcgggtctgagctatccaatgcaactaaccactgtcctctgtctttcttgaatatcaatgctggtttggagttcatctgctcaccttctcgtgaacattgctgccaccacttctctagagtggattcaccaacattaaataaattacttgaaatattatcatctttataccacttaacttcgaagcagtatttactaatatgtccactttgtggtggaaggtagatgtcacccttcagtccatggctctggccaaaagcaccagaacctggaacacgttcccactcaagaccagtacgttcgcgtagtatgtctcttacttgatactcaccacgtttacctttctctctactatctacggccatgttttattctaagtaggaaaatccttctgcatcttttttgacggtaatcttatgggctaatggatgcgtatgcccatgagaaacaatgatagaattcagactatcttcctcatttaatagttcaacgagggtgtcaagtcctttcgtatcaataaagctaatcacttcgtcaaggaacagaagattaatgtttactttactaatagatgttaatagcattcgaattgctagcagagttgctaggttaattctactttgctgaccagtggagcagttctccatactggtacgattcccatcattgaagattactacttgtaatttcgtttcatcaagctcaaatcctagagcaaacttgccacctgtcataatggaaagatatttattaattaattcttcaaatactttcacactatgttctagtttataaccaactagatttttcagagctgcaatcaaaatatccagatcagcaacagcttcctctactccttcgagtttggaagtgatttcttccatttcggattctgctttctctatctgctctaatcgagttttatattttgtatttgcaatctcgacgttggcattatgctctttagccattgcaactttggaacggccatcagcaatttcctgttcaagctgtcggatttgcacctgtaggatttgcacattgagttcttcaaaagaagaatcactcattgaatttttgaactcgtctctagctgctatagctttatcaagagcatccttagctctagtgtaagctgtatactcgagttgttctttctttaataactcaagtttagcttcaagttctaccttttctttatagagagggtcatattcaactcgtgccatatccatagctttttgtgcagccgttgtatccagatgagttccgcaggtaggacattcagttgctgaagcctcatgtttgaacttctgataacgtttcttgacttcacccgcacgtgaaataacaatcgttaggtcacgcgtaacactcgagatctcgtcgtttttgcacatgggcgcgggaagatttttatagggttcgaaagattgttcggcaacttgtacggctttgtccaaattacgcagtttagtaatattagcttcttgtgatttagctaatgccgccttgactttcgattcagtcaactcctgtgacagtggctcttcatcaaactctggaacttctacaggctcctgcaaacttccgagattgtttttaccattgaggatcttcgtaattacggccatttgaccttgcaagttacttaacgtacttgccacttctttacgatctgccttaatagtttctgacatttctttatactgctcttgattaaagagatttacaagaaatgctttacgagtagcatctgttgctttcaggaagtctagatttgacccaacggattgataaatgagcttagtaaatgtttggaaatctccgcccattatatcttcaatcattttatacgtttgggttgctgtatgtccactgatatcttctccattcttaatcagtgtaactttagccgttgacttaacaactttatggagttcatactcatcttcatctttagagaagtaagcatgcatatcgtactctttcttcggcacattccaagagaagagggcgtccttcttgataccgcgtgagttcttgttataaaacaattcttcaataacagtagcaatagtggacttccctaaaccgtttccaccgattaactgagtaactgggtttttatcgaaatgaattacaatatccttaccgtaagacattacgttgctgaatttcagtgtcttaattataatctttgacatacttcgcagctctagctaaaattctatcaatatcgtcctgagatagcttctcaacttcacggaagtaaagttcaagctctcctagcatatcaagatcgacaagatttaatttagcatctttagtaactcgatggttaatcttcttatctaagagatcggagtttttaactgacttcaactgaacaacgtcacctgtaacttcatagattactctatcataatcactaggttccatttcctcaccaacctcaatagttttacgtattaactgaggtaagtcaccaagttcaacccattctacttttaatgtatcagtatcgatgataaaacaaccattcgtaccttttgtacgttctctatggaacgatgtagttaatggagatcccggataaagaagtttagttgaaccaattgtctggctattagtataggagtgtaaatcgccagcaattacagtatcataacagttatacctcgttagatcaatctctggttttacatgtggagggatttcaccacgaacatgcgtgaaacatagttttgattcagatggcttccactttgttttgtggatttcatcgtaaggaactatatcatattcaggagagcgataaggtttagttaccacgtcccatttgccattagttactttattaataacaccagcataatgatataaacatgaaatagtttttgttaacatttcatggtttccagtaaatatcttacctggatgatcaagtcttgacatgaactgttcaagcagttctatttcttccgacgacgggtcggccacatcaagaatatcaccaccagcaatatgaagatcacagttatgattatggaataactcatttaaccgttctcctagcatcaagaatcgacgcttctgccattcctttggaactttgtcctgtcctagtttgatgtgatgatcagcactaaataatattctcataggttaaaaataaagggagccgtagctcccctttggttattagtcgtccagatcgctagcagcttcggcatcgatgcctttctgagaaccagcctcagaaccgcctttagcatcaccaccttcctgcttctcacgaccttccatgaaggccaggatagcttctttctgctcttcgtaagaaggaacagggtaggtttcttccagagaaggaactttctcgaacttcaggaactcaccttcaccatcacacagcgcttcaccgaggatatcaacatcagcagcgtgcaacttagactcagcactagaaggatctttcagagccatctggaactgcattgctgcaatttgctgtacgtcatactcagtatcgaaacctttacctttcttctcgatagaaatatcaatatcgaacgggtcagacagtttcagctgtttcatgatagactggatgcctttcagaatagtagctttaacttccataactttcagtttgttatcggaacgatcaataacgaaagcgatgtagttcttcttaggtttcagaggaacacgattaccgtctttatccagctctttctcgaagaagcccatctcgtgaatcggatcagccttaccacgaacaaagctctccttagtacggttgaaacgcaggcactcaaatggagctgcattaccatctttgttagtcagccaatagacataacgcggaagaacaccagaaacgatacgaacacgagtgataccgttgttgaatttcaggaagtcaattttatcgttagaaccgccagtagtttcgccccaagacttagccatattttatttcctctttaaatattaatttcgatttgttaattgcgattagtgggttagtgtcaattacagaacgtggtatccatatgggaacatattgcatgtccaaactcggatcgtttgtaaacttatattcggcataatttcgtagacttaaaattcccagatattctgccagttgtctattagacaatttatttggattatcaataatcgttgattcattgatgatgaaggaagatccgaccagtaattggtgagcatcaggctctgcaagcattcttttaaataacttgactattaggtcggagtttcctcttgctaagagataaattttctcataatcaaagaatatcatttttctctcaactttatgtacatattatacaccatattgtgaggatttgacaagtacaatttttatttttctgcttcggacttgtcaatctatccgaaactttctctctcaaatttatgtatatattatacaatatttaggagctgttgccaaatgcaatttttgctaattgtactgctttctccggagtcatagtaatagttttccatgcgttattgcgatacacggccatacgtccagaagcctgtcttaatccagtacctcctttcataattaagtctacaacaatcgggtctaactttccatcaactatacgttgtacacgtcctgctagctgttctattaacgattcattgttaatgagacttcccattattaaacaagatagctcgttaagagaaataccttcagagaagatactttgagctgctgcaagacaacatggtccgccttctgccacctctttctggattctcaaacgatcatccagaggcgtggctccgataatctcatgcgttactacacctcgttgagacaatgcttctagcacggattgtattaactctgtcctatcacttacaaatagaactttatgccccatatttacatacagatgcgctaagttaataatagtctgccgatactctggatgattatatacatcattagcacgtaacgcccacggaacattctgatttcctgataactctactggtacggagtacctgtggattacaggagcaacagtgttattaaccggaggactaaagatcttatatccaaagaagtctttgaacataacttgcagaccatctttacgttttaatgtaccagatagaccgatcttataccgagcacatgatatttctaggaagttagtgaatgtagtagcaacgcaatggtgcacttcatctacaataacagtcccgaatactttagatagctgattcgcatgtttattaacagtctgtatattactaaccacgataggtggatcaatattatacttaccagacccaataataccaggctcaaagccaaaccatttacgaacttctgcagcccacatttcacggatggatgtattagtacaaattaccagagttttctggccgaacttataggctaatgctaatgctagaatagtcttaccaaatcctggcttaccattaataatacaagtatcatcacattcttcatatataggcaactgatcttcttcacgcagtttaaatgaaggttctggtatctctaccggagccaacgtgcgtttatcgaccagttcgtatttaactcccttagcatctaataaatctagacgggtaatggggatccacttaatctctttagcaacaacaccactattcttatacataatagggtatttacttgtcattgtctctacatgataagtggtttgcttactacaataatcccaaagttcatcatcgggcttgaaataggctttattagatataacaaccttcataattttattctaagtctaggaatttcaggctcctcttgatggacttgataaataacagggctattatttaccagaatatagcttatataagcgggtgcgtaggataatacaaatggatatggtactttggccacatagcactggtattttccattataaattcttgcagaatgcagaactttggccgtaactacctcgtagaacgtagttttcttccaatttatgagatttccatcagaatctataaactgggtacgtttagatcctatcaattgagatagtgttgttattcgaccacgaatagggtagagcttatacggcaattcttttcttttctcaaataggacaagtctacgttgagaaaatgtgccaggcaacttcctgttatctagcacatatttattataccttgtagttattacagaataatcgccttcttgctctatagaggtaaacgcccgtagtgcatatacgggcagtttaaaatcaagcacctagaactcgcttgatgttctccagatctttacatacagcaataaatttatcatccttgtacttgctgtgatctggatgctctttatccaatgctgcaattttcttgtattcgaattcagcatcgagcaacgtttgtttaacaaagaacgtatactcgtcatcatcgatacatgcaattgatgggtgctgtttcttcatcttaccgcaggagtagtcacgagaaccccctttttcagagtcagaatcaataccaattgggcagccaggaatactgataccacggtctttctgaatattacgaatcagaatatcgttatactgttcaatcagatcttcacgtacaattgctactacggagtcatgaacaagcattacaatcttcatctcatctcctagacctaaggatagaatttcatcatctgcgtcaatagcacctaacaggaggctatcagaagaagcagactgaatgattgcgttaaatcccgaacgaatttcttcaccctgaacaccacgatcttcagagttgatgttgtgcagacgacgcttacgaccaaagtgactatagataaatccaaagttcttaatctgatcgtggcacttatcaatccaacgcttaagctgtgggaactgaccgaagtaagtttcgatgtaatccttcgcatccgcaacagtacattcaacaaacggttcgcccgtcttagctgcctgttccagaagtgcttcgttaacagaatgagctaccttagctggccctgaaccatacagaataccgaaggtaattgctttagctgcctgacgaagagctgggaataacttcttaacatcacgtggttcacatgttaatttaaataccatgtgtgcgatgtttgagtggaagtcagggtatttatcaggctcatttttcatgttgataaatacttgttgcatgtttctgtcaccagacagtacagcagcataataaacttccgcagttgttaagtcccacgcgattacacgataacccggtggtgcaacaacacaacctttaatgatggattcatcacgaggtaactgttggaggttcagcttaccagaagaactcagacgaccagaagtagtcatatgttcgtggaagcctgtacgaatgcaaccatcggcatcgatactcagaagaatcttttcaacataagttgagatcagcttagtcagcttacgaatctctaacagagttttcgcaattgggtgctgggtggccaattcgttaagagcttctgcgttagtagaatctgcaccagtatcagtcagcttaccagttggagtcaaaccaacataatcgaacagaagaacgcggagctgtttaacagagttagggttaaacgcttcattctgatcttgttctagctgaactacttctggataagtatacagcttcgctctagcagcattcagattgttagtcagctgatactgagcttctttcaaacgatcgatagagatcggtacaccacgatcttcaactcgttgcaggaatacacaaccaggcataagaacttcataatacagatcacgaagtttctcgtttttctcaattttaggtatgaagaagttatgtagacgcagagttgcatcggtatcttttgcagcatatggccacataatatcaaacggaatcagatcatagctgaaatcttcttttttgattttatgtgctttgcagtaatcatccttaaacttatccagttcaaagtcataatcacccatatctgtatacttcatggcgagagatttcaaaccatgagtaccacgacgttcatcaagaacatagtgctgcagcattgtatcatgaagtctacgctctttatgtgccttatcaaaggaaagtcctagatgataggaatagaagtgcatatcgaacttcaagttatggaaaacaatgccatgattctgactatccagaattttctggagataatgaactgctacttcagtaatgcagtcagagtcaatatacacgccctgatactcttggtgagaaatggaaacaccaagcagataaccatctcgacagtatagtgccgaggtttcggagtcaaatgcgatcggccctgtaaccatgttatacaccatcttgatgtattcttcggcttcatctgggtcagtaataggacgataatcaccagcttttgcaatcttctcacgaccattaataatgtcatgaatactttcaacggttgcatcgaaaactggtttcatttcaggtttaaagtgtaactgagctggactgatacttgcaatccagttagcatagccaccatgttctacacgtttaccagtataatcaccaatacctttcttacctgcgaaatacaggaaaggttcagcaccaactagtacaacaaaatcataatcatttggatcaaatgggttttctggagtcccgatggtaatatgctttttcagcaaacgtccagataacttctcgttacacatgtggaatacatcaacttcctcgccataaagctggaagtgtttatcgtaacgagtgttgtttagagctttgtcaactactgcaattttcaaatttagtctccttttggtaagtaagtataacttcagtgtttcttctctaacttaccaatatattataccaaatctttgagcgattcagcaactaaaatttcaatacgttgagctaacgtatcgatctcttgtttattaagatcacctgggtctttgccctctggaagaaggaaattaccaactacaggtgttaatcgtgtttttgtacgaattagcttggcaagcgcctgtgcagctttgttaccagaagcatcgttatctaatagaataacaacaactttgactcctgcaataatgtatggactgaatttgtcagcaatattatctgcagtgaactggtgtgtaccaaaacagcaagaagcatagttcactccattatcttctagattaagcatatcaaagataccttcaaccaagacaagaacaggagtattatatcgtacagggaaaatcggtggtgaaacttgtttaggttttactaagtatttaggaggggcagaactgtttatcgaacgtcctaagaataagatatttcttccaacagcatctgtgatagggaacacgattctgccttcccagtctgcttgatgttggaaagcaaaatatttcttcaaggtactagaacttatacctcggaaatcaccttcgaaaaggtaagcagattcaggaattgcaagattcgtagatccattcctaatctctgaaatctttttacgtacttgtgacaatcttggggactgtcggtattgactctcattaaaataatggtaaatgctcggtatacctttaccgaagccacaactcaagcagtgcataactccagattctggatcaatacgcaaacttggatgtttatcatcatgatctgggttgagacaacagatgaggatgtccccacctgtgtctttgtattcaatgcctttcagatcaagtagttctgttattctactcatatatcgctggcctgttcacctgatgaattttctggtttctctttcttagcacgttttggttgagctggcttgtctttctctataggaattacaaactcagcctccatttgcgcaatatcttccattgctaggttagtggtattgtctaaacgtagggtctcccagttcatcttaggcataaacttcacactatcagaggaacgggtctttacgaagtcaaacataatagcaccctgaccattatcagcttttgcagcattaaggttggcagccatatctgcggaatcaagaatccctttagacatacgagttctaccatcttggtcaatctggtaaggagctataccagccacattatgtttctggcaaatagatttgaaagaggagctaacaaccatctgttctttccaatcgtacatatcaatagtcttggaatcaggaagtctggtttggttaatgtagtctagaagagctacagtaactttatcaccatatctagcaactagtttgtttaattctacatcaactgtagtaattgacagctcaggatcatacacgatgatcattggggtgtggagctcatggctttcaataagtttactttccatatcatagaagtcgctcattttagccatgttatactgcttaacgaagttgtcgaaaagctcttcaccaccattaaacattctagccctagttcttgctaatctcagtaaagcagcaccttcgagagtgttattacgcatagctaaggcggaaacaccagctaacatagctaaattacgtctaaacacctcatgctctttcatttcaattgagaaatatggagcaatatctccatttaaatattgctgaacctgtatgtttgaacagataatggatttaccagtaccacgccaaccaccaagcagtaacgtttctgtgcgagctaaaccaatttgtgcgtcgaactcattacaaataccaagagcaattaagttcagtttggtatcttcttctctctggaaaatacgcattgtgtctgcgttgaatacctttccagtattcgttactttctcttctaattttaagtgaagggaggcaactcggtttagaatttctccctgatccagcattgttaaatcttgaagcacgtctgtttctagaagtttcaggaatagatcctgtgtatactcagcttctaggacttcaagtgcctgttccatgctcacttctggtatttgagtgttagctaagacgacaagagcttgagaaaggcgggcgttcctattggcctcaagcatcagtgcgtcaatggacggcattgcgttatatttcttataataattctggacggcttggtaaattgaggagaaagcgtcattaaaatgatctttatgcagttttgagaatgtttccaatgctatttgtttctgttcagaagccagaagcatcttcaacactacagcttgcacgttaaacaaggtcattctcctttgcacgctttcgtgccttctaaatgcaaaaaggggaaggagcatagccccctccccttaggtttaatttaccagattattcagcagcagcggcttttgcatccagtttagcacgcttagcagcaccatcatagtccttagcaaccagaccacggcgagaaagcatagacttaacaccacgctcagacttaccagtcttctcagcaacttcggcaacagtcatagaagccagatccaggccttctaacagatcttcacgagtcttagcacttgaagtttcctgtaccggcatagcagtgatacgaccttcacgaagcaggctcagagccttaccacgaatctgcttgatattacgatcaaagtgagcagcgatagcttcgatagtagcgccaccaacaaccagatttacgaagtcattttcttcttccggagtgaaggaacgaacagcggcagctttttcagttggcttaacagcagcagtcatttccagactcaggatcttaccctgtacctgcttagcaccgaactgtccaccagctacagcagcagcgatttcagcataagtatactgaccagcgtgagagttcaggaaatcaaccagttcagcttcctgctcaggagtccaaggggatttctgtacttcgttagctttctgtacttcgaaaccttctttacgcagtttggaaccaacagaacgtgcagttacgtccttaccagtttcagttgccagttcagcagcgatagcagcgacttgttcttgagagattacagcaacacccagagcggtagcttttgctttcagagactcggttacaccttctacgttccagttcagtttagacattattatttttctccaatagttctttaatcgacaggatttctatcccattcgtttcggctttcttataagatgaggaagaacgttttgattcatcctcacagatgaggtattttacgtctttggtaacggacttcttaaccgtgtaacctagactttctaaatagtttgttgcatccgttctgtttgcaaaatcttgcaaagaaccggtaatacataccacgatcccattaggttgagcgactaaatcatcagtaatgattacatcagctttccgtccggtaataccggttgtgaatttccatggtagttcgataacatccttgccttgtggggaatttagccaggctttataattttctccagctttgccgtcagctttcacatcatgaaagctagtgcaaccctgggatagctttttagcagctacctctccaatcagagggattcctaaagaaccgagaactgaaccaaagtcaatgtctccgcgaaccttagtatttaactcactaactaacttagtggcaaccttgcttcccacagctccgaccaaatcttcttcggtcaggtaaaacagttctgagatcttagtcagttccagcttctcaatagtttttgggccgaaaccctttaacttcatttttgtgcagaagttctcgattaacttacttgattgagccggacaacttgacttattacggcaaaataattgaccgttaacaagatctagcttagaaccacaagagggacattgtgttggaatttcgattttcatcaaatttcttccttatcaatttatataaatattatagcaagtatttaagcatttagcaaatacaattttaactaactttgcttaccctcgccataactttctatccctcaactgaatgataatagtatatacctaagcggcgaaaatgtcaataaccactttataattccgttacggtcaacgggtagcaaagggtttgtaattaatcgtctactcgttctacgattcgtgggattacaccaccagcacggattactcggatttggcatccaatctctagatcgagagcgttaatataatcaacgttgttaagggtagctttttcaatagttgcatcatcgataattaccggttcgaaataacctacgggagtaactttgccagatgcacctacttgccattcaactttcagaagagttgtaacctcaccttcttcatcctgtttaacagcaaatgcaccacgtggatgtttattagtccatccttcacggaagaacttattattatcattaatacggataactttaccatccgtaggaatccatttaaagaatgagcgaacgttaacaactgttaagaagttctcattttccagccagatcatatcactgagataatgggctgtgatacctactgtttccgcagaacactgaataccgtaagctacgaagattaaaccaccttcaccaatacgttcgatgaaatcatcttcttctttcaggttaatagcaccagaagcatagttacgtttgttctcaacttctttagtgatcaggacttcgccagtgatctgagttggaactttttggctaatagttttagggatattaagcaatttaacattatgtgttacgtcattccctagaataccgttaccacgagttaatgcctgaacaaattctccatcaatatataatagagaaatcgcacaaccatctaacttatcagtttcaacttgaccaagtggattgaacggagctttatcaccacgatcgtaataaactttctgcaaagagtacatacgatacagatgggggatatcacctttcgggccgatagaatcttctgccattggaaaacgtttaatcaggcgatcatattcttcatcagaaataatactaatcccttggtaatacgcatcttggcaacgtttgataaagtcttttacattagtcattcagatctacctgtaattctttattgtattgggcaactaactgttctagttcattggcttcttttaaccacgcatctttgtacgctttatcgttagtgcccttgaagttgtccagatagttatttctagcttgagatactagatttagctttgcttggatttttggaagtgttactttcataattgatcctctcatcaatttataagaatattatatattaaaattgagctggaagcaagtacatttataaagaaaaagccaagaacttattcagtcttggctttgatttcctcagctcttttctgtacttcatgcaatacctcagattcactaaggatttgtgtgaaagcatagaatagctgtgatgttgtatctagagtgtaaggaaaagagaagccggatttcgttggaaaccattctccagtaatatcctggagccaatacctaattcccatgtatagattcccacgaaattcagataccgtcagtcttacttgttcaccttccttttcccacagaaggattgattgatcatcaacgtgtccttcatagttttggtttacctgatcgctcatttacgtttctcaaatagacaaaaagccccatataggggctaattgttttcttatcggcctactggagaagcacgatctaactctgattgaaggctcgtcacacgacgaacttttgcaacaggaataaaacggaagctatcgttagtacgagagaaaacgaggatttcatcatctttcggcttacgaatacgctcacgtttaatacgctctgccaggtacttgtcctgagcaggatcaaattccatcgtaccctgaaggtacgtggttcctttctgacgcagtttctcgtaatggagataaaactcaccaaatttgttgcattgtgcaatgatttcagctttgttcataactggatttccttgtgttggtggatttatctaagaattacttagtgatagctcggatagcttctgccagatgagcagctgctttaccggtcagcttgtcgataattgcatcgtccaggaagtcaggtgctaaacctgcatcggagaatgcggaacgcagatcagaatgcgcttgggctttagaagtacgagaaccaccagaagctttttctccagtagatgcgcttgatttagaagtagagctagcagctttcttgatatacagacctgctttggtcagcttcatacggaaaccattcggagttacaccgttttcctgggcaatttcgctaacaatttccatgctaacgcccggacgctcatcttctgggaattgctccatacgagcaacataatcggaagacattttttcgaacagttcatcagtccactgagttggagtagtcatatttttcaatttccttaattaagaattaaacagaatagttctttcaaactatgagaatattatatcaagaattacaggataaagcaactgaaatttttcagtaactgctacacatcaatcaggttcaacgatctcccaatcgtcggccagtgcttcttctagggttaaatacacagtacgtaccacaggtggtgttttctcctcataccatgtgcattcacgaacaattccagtatccacatcgaactctaggagtacggtctcaactttactatttccccaagaatctcgctggagatattttacgtctccagcttttaatagctcggtaagtttactcacggcgttttcctttctctttatcgagtttcaaggcagctttaacagcttcgttaactaacgtgataacttcttcacgactccatttaaaaccaagagccttaacatcaactcctagtttttccagatgtttcacagatgctaattcgtaatgcatatagtgcacgttctgttgtttaccttcagataacaaccatacacgatagcatccaaccggattagtcattgctttcttgatctcaccaatacactgatagccaggaacccaaacaagttcaccaacttcaaattcttctgccattgcatcatcaggaatcaatggtggattcagtggatcaacaatatcattcaaacgaagtaaagcaccataacgttcaagaacagatttaatcatagctacggaacgatagttacgatctgcgatttcttcgaaagaatcaccagataaatactgttcaattacgtttgcaagctcaacaccttcaatcagtgtgccacgctttttcttcttcatttccgcaacttgaatctgacgatcacgccattcttcaatcattcgttccattgtcggattagaagaaactccaagcatttcacatgcagctttcttcgtacccccattctccagatgttcaatgacctttttaaaggtttcatcagggatttcgtggattagtttctttctacgagaaccagccatataaatactcctctctcaaatttatgaatctattatacagaaaaattttgctgaaagcaaataaatttttacgattctttgagtaaagaagccagctccgcgtaaactttttctaattcgaagccaacgcgaagagacacacgagtcttccgttgttttagtaaccatatggagacattagggaggcctgcgagacgagggggtacaaccctacatagtttctccgcagtatcatattcagatcgtttactctctttaactggaaacttccttgtttcccattttttattcttcgctgtcatttctagcacctaattcagccagagcttcctcatgcatctgacgctcttcatccgtcataaacttaactgggattggaatacactcaatcttgcagtaagttctataccagtctacaatcttctctgtgtctagatccttgccaatacccatcatacctaaatacatacgagcatattttgggttagcactttgaccagttttaaggaagaaatctttcttcttacctttcagagcttcaataaatggtttaatagttacgttcgaacatttcttaatatcttcccagaacatatcatgcatcttatggaagaatgcagccctatcattgggtttatccttgatatactgttctacatgttcaactgtaacatccttgacggaatcaagatgataataacgaactagaagaagtttagattcatacgcatcagcatgacgtggagcacaatagtcaggagtagaatgcagaattgctttgattctttcttctgtgtactctttgcctgcgccttcgatagtaccccagctttcactgaaaatatcgatagttgcaccctgatctaataggtaataacgtaaagtactcgtatagttcctagactccagttcacgacggcgtgcgtataattgttgggctaactcaatccagccttcatcaatattatactgctcggaacccgcagagaaaccgctcgtggatttatcaataaaataataaatattctgagcaccacggtcgcgcctgattgcctggaagcgcatgtttggcgcttggttacttgtacgggtgataacaaaaacgttatcgaaatagttaaagtcaacaccactcgttacagacggactacataataaacaatcaatctgttgatcaatcagctcattagttgtataatccagaatatgacgaatatctacatcagaagtggagtttgagtgaatttctttaactaaagcaccagtattacgacgtaatgccatccccttttcattcagttcatctgggccacagtcagaaactagaatagatttctcacccatctctagggatgtttgtagggctacccaaatactggattcatcagggaactcataagcatgagcttttgaaagcattttacggtgatgattatagaacgctactggtttatcaaactcaatcagagaaccgtatgcttcgatagtttctgcactaatatcaccatcagataggataatgattttagccgttgcaaggatatcccgaagaacctggatacattcacggcgatttttaacaacgggagcaaacaatagatcattcattactgcatcgcattcgtcaataaagattgcatcaatctggccgatgaaacttttgaacttatgtaatgaatgaatcgttgtagacatacgattaatcgcgccacgcttaaagttaagcatatctacggatttatcatactgacctgccccgaatttcttggcgtttgaggacaccagcgccctagtgttagtaactgcaaggaaattaccttcgatcacacctgagtcaagccagcgaactacagcagtagttttacccgttccaaggctagctttaacaaacgtcatataaccttccggtggaactgtattcagtttcaggaagttatcagtttctagcgagttagtctctaactttttaagaggtatacccttcaagacttctggaatctctcgcttagagttattaacaaacgcttttaacgcctgctttcttccgttattaaaatagtcttgaatattacgggtattatccttagttgcaatatactctgataaagccgggtgaatttccttctctagccaattgaaatctataccatcctctaacgctctgtgatacagttttggaataatacgaagatatacaccatcctcagcttcttccaattcgctgatagtttcttccactttatcagatgcggcctttttgcctttaatctgatctaacaaggagaaaaattcctctttgaactcacctctagttgtttcatagtcaacgagattattaggtaaatttactttcgaacccttaacaaacaccaaacgtgaagcgccctccgctttaaacggatcaacaataccatcggtgaataatgggtcggcaaaataatgaagctgaactgaagagtaataagctaagtcggcaatatcaaagccgtacttttgtctactactttcattgatagatgtgaataggaacttgatctgcccttgtgtcacttttacattagattctagcattaagtgcattcggatacctggttttagaccagccgaagatgatgcatgagctataaaccctgcgtcaagaggaaacatatcctcactaatactatttaacattctaatgatatgacgtgccatgccaacaagatcaaacttgttacaaccacctgtatctacaataccatccacgtccattgcaataatgtggcttggattagatacattaaagttgcccttcttacgccgcacattatttctaggtgcaagacagcgacctcgtaccgcaacgatatgagggtcagacgttaaacgtctcataagaggaagcatttctactagggtttgcggatcaacctcatcaattacatcaaatttgaaaggcatggatactggcttaccttctgggtgggaagctgagaattgcttagcaaaggtataatcctctactttaacctctttccacatccctgttgccagatcgcgggaaaatcctgcgtgaccttgtaggattgagaacacaatactactcctgtgttgaaatgaaaaagttttctttaggactattcagaaagaatagaacaactgttactgttaattctccaacaaactaatttcaaatactgaagtggggtggcaacttccactttcacgctgcgctgctgcttcgctatatcgcacaaatccttgagggtagccgctaagccagatttgttcacctaatgcttcatatactagctcatactagatgcaatataacttacagaatcacgtctcggagtttttcactcctcccatctcacttcacaaccacctcattctaggttgcttcgaggccttaccagggttcctatgggacgcagatcgttaagtattctattaactatttattcaaaaactaacacgtaacagttaaaacaacctttaatggggcagccgaactgttccgtattgcggattgtaaacaagaaaaattagcaaaatcaatttttactaatgtctctcaattcaatataaatattatatcaactttttaagcatcctgcaagtaaaatttttccgacggtgctatcattggtcttgagtacagagaaaaccgagccaaaatgactcggtaatcaggattgagctactgaaaatcaatcgtcattcaagccaggaacataaatcccaacatggtttaattgatttttagcttcttctaggatctcaggagtgtactcccaaaccccatcatccgccactaataaataaggggattcaccattatggggatcacgagctatggccaaaccacgtggatgaaatatagagaagttaagggcaactattagacccatcgccgaaacctcattccaatccatttccacatactcagtactctccagttcaggaacgtgaacctccaagaaaatacctagactatgatcatctacttgagtatcagggaaagataccgaaaccttaaccgcccccagccaacgagcgagaagcccttcagcacgctctaccaaactaggatcaatctgacgccaaaatacttgttccattctgcctcctttaagcagttaaacctgggatctgatatccaaaacggcgaagtttttgaatgccagcatccacttcttcaggtgaatatttccagccctcacgttcattaacctggaaagcaggagcttccccattacgataatttaccatcaaacgatgtttaataggcatgaacagcttgtagttcaaagcaaaaaccagacccatgtagtccagctctttccaatctacaatctcttctatcccatcttccagcattacacttacaccaatacagctagcttcatcggagtctgaagtaaatgcgaaagcaatctcgttattctcacaccaaatcttgagagtattgatagcttcctcaaacagattatctggcagagaacgccagaagttaacaaggattggattgactgtgttttcaaagaggttattaaacatatctatacctttaagttttggagggctttacacattgctagatcagggctaaactccaacatgtagctgatagcattcagatcctgcatatttattccagttctgccattgacaataactgttggatactggtacatcatagctccagcatcatctaggacacaccagtgcttgagtttgtacttttccacaaaccgaagaacagagttgcctctagatagcccgccaccagtaaaatcagtagtaccaagaaaacgatcgaccagacctagggcagtcataatctcaacattctctacctcgttacgtactgtaaaccatgaggaaaccccaacaatcattatgccggacggttttaagaagttctgaaatgcttggagtaggggtttaaaaacccaatctccaccaaagaagatcttctcttcgtccggagcgtgatggtgagagatgctcgaattgagcaccccatcaatatccagaaaaataattggagtattacttagatccaccggagttatcccattgcagagttttagcttcatcagagaaaggaacgtggtaatcgatcttaccttttccaaacatagccgccataaacaaggtatagatagtaatcataccaatcaggttcaccgtccacaccaatgctttccagatacccttaaaaatcttcttcaccatattctccctccttaattaggaattctttccattctgccgtatcttcgtagataacgcagaaatcatcactcttccacgagaaatcatcagtagcatattcaaaacggtagcaccaactaccgtccggccatactaaaagatcacacatgcttttgcggtgcataaacagttccttccataaaagcttctacttggccaataaagtgtttgttaccaaaaacttcggcagctccagcacgccacacagtaacaccacgtttctcatactcaagctgttcatcgtaccgaacggctgggttcacaatcatcatcttagtacccatatttagggcagggaaaagttcccagttgaagttgataacttggttactgcacccaaccacgataaccatatcgttagccgtaagactatcaaaagtagcatgcatcaaagcatactcaggagctgcttcaccaaagaacacaacgttaggctttgcccaataaaattcatcaggattaatagcagtataccccacatctaggatgtactcttttcgatctggcaattccttaatacgaacttcgggcaagtagccatgaacatgaagaacttcactttttggcacaccagccctttctagcaaatcatctacgttagtagtgatgttcaatacagcttctggataccgctggaaccattctccgatacggagatgcgcaacgttaggttcaacagtctgtaactcttggcgacgcttgttatagaactcatgggttttccagtagaactgtccacgaaaagcatgaatatcacacacttcttccagatcgtattcatcccacattgctttgccgctagcagtatctgtacgaaatgcacggatgccactatcaacacttaaacctgcaccactaacaacaattagtctacgcatttttcacctgctctcggaagttttcactaagaccttgcaatatggtagcaatatctggttgaccacgatccctcaaggattcagctatatggtctagcattatagcgcaagaggtaacaccatctttgtacccttcattccacctttccatcaacacgttactgagagcatcttgaagttgatcacttggtagcttctgattcgagaatgccatatagtttctcctctagttccataatacgagtttcataagatgcacgcagcttctcgatggataaagcacgaaccgtaacttcatctgagttaatcgccagttgagcgaggtcttccgtttccatgcggccattgtaaattaagcgatatttaagatgttttacgtttttcattcttcaaccttataaattgtttctgtagagatactaccagctttttcgatataatcaattgttacatggccaaagcctttacgaatgtatcgaattctaaaatgctttgccttacctttcacaacggaacgcagcacaacacgttcatcaaagtaacctaaccaatcaagagccttacgttcttcactaggctctcccaaatatgaaacgtctactttaggaagcaaatcgcccatagctttctcctctcaaatttataaatcaattatacacaaatttttagctgaaagcaaataaaataaaagccaggtcgactagcaacctggctgattcacttacttagcgcgaacgtctctatgtttcactcgacccataacctcatgttgtttacctgggttgaaaggacgtgctcctgggtttccaaggtacccacaaactcgacgagttacctctaaagtttcaggatcatggtttccacagataggacatttgaatccatcctcagaagcgatagtctcacccaagaatccacactcaccacaggaatctactggagtattaataccgaagtaatgaaccttacttgcagcatagttaataacccattccaatgcatcagggaatttcttcatatcaggcaattccacataggaaatgcacccaccagaagcaattggagtaaagttagactcgtaatcaaacttcacgtttggagcaactttacgttccacatcaaggtgatgggagttggtgtaataacccttaccaagaatatcttcatgctctgggaaatattcacggtctagacgacagaagcgatcacataaggattcagaaggtgttgcatacaaactataacctaactgagtttcttctttcttctggtctgcacgatcacgcatatactgtagaacacgtttcacaaatttaacacatgtatcagacattgtatctacatctttaccaaacatgaactgtagcatttcatggcagccaatatatcctagggatacagacgcacgcttatagaaatgatcaaatacatattcatctggccccagacgtaatccaaaggctcctgacatatagaggatgggcgcagctttagcttgaatgtactttaagcgatcaaccctccactccaatgctttaagtgcagtatcaacacgcagctcaagcagatcgaagaatagatcaatatctccaccagcttcgatagcaattctaggaaggttcacagaaacaacacctaagttgttacgacctgaagtttctccatcttccgcagcagccaggaatgaacgacaacccatagaaactttgtaatcaccagtaacttcaaccaccttatcataactgatatagtcaggatacatacgttcagcagtacatttcatggctaacttcttgatatcgtagttaacatcaccaggtttcatattaacaccatcacgaagtacaaataccagtttagggaagattgcagtacgtttattgataccaagaccatccatacgtacttcaagaatcgctttctgtactagacgagcttcccaagaagttcccagaccgaagccaaatgtaataaaaggactctgaccattagagttgaacatcgtattgatttcatactctaggccttgacaagcatcataaacttctttctcagtcatttccgtagccattacggatgctttagcttcatccttagtccaacgcttagcaaacgcatggttcttatcataagacttacgaacataaggggctaatacttcatcgagacggtcaacagaagtaccaccatactgatgggagctaacctgagtaataatttgagctgtaatagctgccgcagtagtgatagagttcggcgtactgatttcagcattaccaaccttcatgccattcttcaacatatcttccaaagccacaaggcaacagttagtcatacctagagctgcatagtcagcatcatggaagtgaatatcaccaatcatatgagcatttcgaagctgaattggcatttcttctagaatcagatacttactcaactcacctgcaagcatatccctttgtgtaggaaaacgttctgagggtttattagcgttattaaatagcagttcttcatctgctgaaccttcaataatttccttgcagtttctaactagatcctgcattcttttagtagccattttaataccgtagttcattatattctccttctctaactaagactactattatagctcatttgaaggcgtatgtcaatataaattttctaaagagctaagtaacttgatttcagtcaaaattgttgttgacaccttgccctattttacattataatcccgcgcccatgtacgcgatataaaatgattatctagtaccatacatctccctctctaagcaagtaaattttttatttaactgcaatgtcataggcttatttaaaattgtagttgctttttcctgtagatattggtataatatatttgtaagttgataaacaagatctttttgttgatcctctgttagcgaagtacactataggagtgttatttatgggaaaaccgcgtcagaaaagagaaacccgtaatgggtcaagaaagcgtaacagcaactacgaagataacatcattcagggaaacttctctgattttgctattcccgttgctaaatccctagaaggtaaaaacaaagagcaaaaatcatatatcaatatgatcaggaacaacactattaccgttggtattggtgaaccaggtacgggtaagacttttatcccatccgttcttgctgctcaggaacttactaatcctcgctctaatattgagcaagtgattctagtacgtcctaatgaacctctaggcaaatctcttgggatgctaccaggtgacctagctgaaaagttagaaccttggttggaaccgattgcagatggcatgaagtgggccattggtgatcaagcttataaggggtatgtagaacgtcagaaagttaaattcctggctatcgaacatgctcgtggacgaactttcaacaactcctatgtgattgtcgatgaagctcagaatatctcagtcgaagcaatgatctgtctactaactcgtgtagggcaagattgtcgcttagtaatttgtggagatatagctcaaaaagacattaagggtgattcaggtttggcacttctaatgaatgtgtatcaaaagtatgaatacgctcctttctcaatgattgaacttattgagaacgtacgttcccgagaatctaaagcattctatgacatctttaaagagatggggctggtgtgatatgggaaatgtcgtacatctacatcgcaaaactaaaattcaccgcacttcactgagtgctgcaaacatgatcacccgtaaagagggtgaagaaagtcctaagacttctctagcatggaaaattgtagcctctaacccaaatcgaccatttaactataatgaattgaatacttccgtagatattttaatggctaaggaaatacgagagaaattaagagatatggccgataaaattaaatggtaagacagacgagcctgggtatgaaaatatccgggctctttttatccttatactgggacacttaaatggaaagacttatatatccaaccaaggaagagctggagaaaaccttctttgtagatcttgaaacaggaatactaatgagaaggatgaaatccggcaaagtaaagatagctgggactataactggaaactatatgattgtgtgctataattaccaaaggtatatggcacatatcatatccttcatcctagataaaggataccagccagagggtatagtagatcatagagacggtaatactttaaataaccgtcctgataatcttagggaagctaataatacacaaaatatgtgtaatgccaaactaagaaaagataattcttctggttttaagaacgtattcaaagaaaggaataactggagagtacgtatcagggttaatggtaaggagtattctaagagaggatttcctaccgcagaagcagctaacgaatacgctattaaatggcgagaagaactacatggcgatttcgctagacatgaataatgtaaaattgtacttgcataatgactcaaaacaaagtagaatactatctaaatcctgagaactataagaaggaaaccgcaatggactttagaatcacaaaagtaattaaacgtgacggtactattcaagactttgctcctgaaaaactcaacgattgggctgcatgggcgtgtaagaacgctaacgttagctggtctgccgtagttatggctgcactgaaaaatctgcctaaaggggttgtagattccgatacacttcaagatgtattaatcaaagcagcagaaggtctgatcaaagataatcctgcatatgacgaggtagcaaaggaattacgtcttgcacagatgcgtaaacgcctatatgattcctatgaaccaccttctttacgcttcttccatgaccacatggttaaagtaggtgcctgggaagacatgagtgcatggatttccgatgaacagtttgacgctctgaatggtgttatcgatcatgaacgcgatcgcctcttcactagcggtggtctgaaacagttctttgataagtattcccgtcgtaatatcgcaactggcgaaatttacgaaaccccgcagtttgcctacatgggtatggcaatggcgatgttatctcaacctaactggacaattctggatgcaatcgacctttacaacgcaatgtcgctccacaaaatcaacgttcctacaccaccattggttggcctgcgctctagtgaccgtggatttgctagttgctgcctcgtggattccactgacactctggattcaatcgacacagccgagcacatcgtcttcaaaatggtcgcagcaagagcgggaatcgggtatcatcttgaaagccgatcaattgctgatccggtgcgaaatggggcattcccgcattccggaaaactgccatattatcgacacatcgaccgttcagtaaaggcgaacactcagcaaacccgtggtggttctgctactgtatcttatccgtacttcgatcctgaaattattcagttgatgcaggttaaacagcaacgtgctacagacgagaataaaatcgataagatggactactctctgagctttaacaaccttctgttaaaacgttacctgaaaaacgaagatattacgctcatgtcttacttctatgcaccagaagttcacgaagcgttttatggtgaagatgaggctaagtttgaagaaatctatgtggcagcggagaaacgtgtggcatctcttacaaagatcgaccacgaaggaaaaacaattccagcagctcctaaaatccctgcaaaagaaatcctagatacttggttacgtattcgtatggaaacagggcgtatgtatgctcaccacattggtgaatctaaccgtcatgggaacttccttgacccgattcgtatgaccaacttgtgtgtagaaattactcagccaacccgtccattccaacatattacggaactgtacaaaactccagatcagctggatgatatgcgtccagaagatattggtgaagtatccctatgtaacctaggcggggttgttctaggccgtatgagctctctggcagaatgggagaaaacttgctacatccttctgaaattcgttgataccatcattgaaattcaagactatccattcccgactatggagtatacggctaagaagcgtcgtaatgtaggtattggtctgatgaacgcagctggtgcaatggcagcagaaggtttggcgtacgaaggtgaagaagcccgtaactggattcaccgtgaagctgagaaactttcttacttcctgcataaagcctctgtacgtctggcaaaagaacaaggtgcttgtgattggtttaaccgtaccaaaccttctcaaggaactctggtaattgacacgtacaagaaaactgttgatgaactggtatcagtaggtctagaaatggattgggaatctctgcgtgcagatatcctgaaatatggtatgcgtaactctgttctgacagctcagatgcctggcgaaagttcctctgtactgttaggtgttactaactcaattgagccaccacgtaagattgtatctatcaaaggtagtgcagtgaacaaagtaattgcaattgctccgggtgcaactgattgggatactctcatgagctataaactggcttatgatgtagatcgcattgagtggatcaagtgggtagcaactatgcagaaattcttcagccagtccattagtacgaacatgtactatgactacaccaagtttgagaatgaaataattcctggcccagtagtagttcgtgatttcatgactgctgttaagtatggctggaagacttggtactacgctaacttcaacactgaaaacggtggtggagcaggtgaagaagccgcagctggttgtgcctcaggtggttgccaactttaataaaactaaggagatcttcgggtctcctttttctttgaaattttacttgctaatcgctacctgatttgctataatattcctgaaatagtgagaaagaggaaaatcaatgactactttactaaacctgaattgggatcatactaaccctgagcttttcctgggcgattctctcggtatcgctgattacgttcgtgtagcgcatcctgaacttgagcgtttagcactcctacaacgttctcagttctggactgaaactgaaatcagtctagaagctgacaaaaagcaatggcctaatcttcctaaagatattcaggaaattactctcctgaatttagcatggcagactcagaccgactcatttattagtcgtgcgccagaagcagcaattatgccactcgtaagccgtccagaattggaaggtatgatgaagcagtggagctacttcgaagatctgcacagccgtgcctatagtaacattatccgtaacgttctgactgatccagcagaatttatcgattctgttaccaagaaccaagaagcattcgcacgtatcgcagattctgtagagctatttgatgaactgtatcagttaggccagtacttcatcgcagtacgtgatcatcgtggggataatacttatccagaaactgagttccctgaagttaaacgcgaaactcaggctaaactgttagatgcttactttgcaatctatgggctagaggcaatgcagttctacgcatctttcgcgtgtacctttgctctagcagaaaatgatatcctacaaggtattgctaaaaacctgcaattgatcgcaaaagatgaagccctgcatactcagatgtccaaagcagttatccagatcatgttccagcagtttgaccaagatctgattgatgaagctctggctaaagcaccagcacagcttctgaaaactctgcaaactgagatcaactggggtcactttatctttaaaggccgtagtctgattggactgaacgcagaacttctggaagaatacctttacttcgtaggacgtaacgcatttatgcacattggcgtagaatggccgagcaatctgcctgtaattaccaagaatccgattccgtggatcatgaactggctagatactacctctctgcaacctgctccacaggaaattcagattggtgcagcttatcgtgtaggtcaggtaactgagacttcaactgataccttgaaagacctaggtaatgaatttgagggcatgttctaatgatagcagcaatctatgcaactgggccgaaaggggaattcggcctcaatggtaaactcccctggggttccttcaaagaggaactagatatattttatgccacactagattccctagctccagataatatcattattggtgcaggtacgtggttaggttttcctgaaacgattcaaaagcggatattaggggattctgatctatttatctatgccaatgccaataagcctttaccggaaactattggatgtcctacccgaattactagcattgggtatactttgcctgaattctttaaggaagaagtaacagtagtattgggtggagcagctttgctcctagaaatgtatgctaaaaatcacctagatatggcatatgtttcgacaatcgcatcagcaacaccattatcagctgatgtacacttgcatccacatattactatggctaactcgatggcaaccagaatggagtatgcatcaggggagaatgcggataaaacccttttctttctacaggagctggtaacgtttaaatgaaacaatatattgaaacaggaaaacgtattctcgaagaaggtcagtgggtaactaatcctagaacaggagtacgttgcctcactattattgatgcagatttcacttttaatgtgggggccaatgaatttcctcttattactactcgtaaggcatttgcaaaacaagcaataatggaaatgattggctatctacgtggttatgactctgcagcacaattccgtgctatcggggttaatacatggaatgctaatgcaaatgaaaaccttgcatggttggataacccatatcgcaaaggcgaggatgatatgggacgagtctatggtgtccaaggacgtcgttggacaaactctgatggtcttatgtttgaccagttatccaagatctaccataatctgaaaaggggtattgatgatcgtggagaaattctaactttctggaatccaggggagttctcgaagggttgcttgcgtccttgtatgcacacccaccaattctctattctaggtgatacgttatacttgaactcattccaaaggtctaatgacttcctgctaggtcaggtgtttaacatggttcaatgctatgctttgcttgcaatcatggctcaaatcaccggatataaacctgggatcgctcgccaaaaaatcgtgaatcttcacatctatgagaatcagtatgaagttctaatagaacacaaacagttcgatcgtgaaccttttgaaccacctcatctgattattaatccagacattaaaactctggatgacgtgctgacctgggtaaataaagatgatttcgatgttgtagactatcaacatcatccagctattgcttacccattcacagtctaacttaaatagcccttcggggctattatatttaaatttcatttgcctattgagtgaaattcaaatataatatattttataaatcggagacaactatgggactctttaaaaagaaagtttatttaacacacagtcaagaacgtaggttcttagctctgtctcagtattatcatttacctttcgatcattttgtagaacgggcgatagaacaatttctagataaggaattaaaggcaattagacctgaaccgcctaaagcaccaaatgaagcacagagaggtcacccacgtatccctcctatgccgccaattcctccggcgactagggttatcacagaaggcgaaaaataatgtctattcttttatctgctttagaagcaaagcaaaacactattgctgttattaaacaggaagtgattaatctagaatctcttattgctgtagagattgacaaagcaatcaaagaaaaagaatttaattgccatattcagggattaactgaatactcagaaaacgccagaaacagcgttatgcaacgactcactaaactaggctatgtagtagacgctaagtatgagcagcgcgaaggtttttggcttgaaattgattggagtaaataatgtcggttttccacgtatatacagatggtgcatgtaaaggcaatcctggtttaggcgcttggggtttcattgtttttaatgataatgatgaccgtttaggctctaaatctggttttagcaagaaaaccactaataacgaaatggaactcacagcaatcgttgaagtccttcgttggtctactaagaaagatagccgtccagttattatctatacggattctacatactgtaagaatggtatggaaagttggatgtggtcttggcagaagaaaggctggaagaaaggtgatggagagactcctctcaacctagatctttggaaagaagccttcgaacttactcaattatacattaaataccataatactaatccaacatttgttaaggttaaaggacattctggtattagtggtaacgaagcagtagatgctctctgcaatacagttattgccgaacaggaatttgaagagaagtttggttaataatttaaaaattcaattgcttaaagccctcgattttagtataatattcgtattgaaagtgaggagggctttatgcgaatttataactcaaattcattaggttttaaacccttgagaaaacgtgcacaatctccgcgtcagataagaaaggctaatatcggagaaccagaaacgcgtcttccgccacctcctgaacaacgtttagtttatctagacgaggaactggcagaacgtgaacgtaaagctcaagaagaaattgagcgtaagaagatgtgtactgctccggcgtataacaaaggcgcatatcagtacgtttctgatgaagaacaagctaagatgatcggcaagtaatttttaaaaaattcatttgctaaacgcttcaaaatctcgtataatatatttcataaattgatcaacaaaaaggaaaacaaataatggctaagcagaaaaacgcaaaaactcaggcagctccagcagttaagactttcccgcagaccgaagctaatcgtaaagctcgtctggaacgtcatctgcgtaagcatccaactgatacgcaggctcaagctgctctgacagctccactgacagttcgtcacaagccgaaggctaagaactccactcgcgcaactgctaagcatgttgtattcgttccgggcgaaggtcacaagtctgtaccagtaactctgagcttcaacggtggcgctgaactctttgctcgcaaagatatgtctccgaaggagtatgaaaaggcagtcaaccagaagcgtaagccaatggctgatgtaatgcgtgaatcccgtggtcagttcggttcggttaaaccgaatatcttcggtgtagagtatagccgtgacaacgttcgcgctctgtgctacggcattggcatcaagttcactggtgcttctgatcgtaaatccgctaaaccggctcgtaagcgtaaagcgaagtaatgattgatggggcgaaagccccatatactaactctctttctaactaaggatattttatgttctctaagaaaccacgttccgttactgaaatcgttgcttcctttaccacgatcactgatgaacttcaagctcgtattgatgctgatcagaaaaccgctgctgatatccagaaacagcaggaagaacttgctctgaaattggctgaaaccaataagagcgaaaaatctgctcaaactattaaggaaaatatccttaaactgctgggcaagtaatatgagagataataactcacgtattatgtctgggatgctccaacgattgttcaacgatggagcggtaagggcttatcggacagaattcaccaatatctggaaactagagttcaggttatcagacgattccgaggccataaacaaccgtacctttacttggtatgaatatgaagatgaagcccaacagtttagtgaaggttactttgtaactcctggagaagctcaggctgccctagagcactactgtaggacttatctctgatatactagggggcgaaagcccctctcatttggagaaactatgcgtaacttcgttgcaaagaatgattttaaccgtgctagcactcacaagtctgcgagagattatactcgtctttctaaacatgagcttttagaagaaattatggaagaaaactgggatgttaatgaaaatgggacagacctgtttgaagaggaagaaattcccttgaaagaccccaagcagtgggagtctaacaaagagaccactctttgttagttttctacacaataaaggataagttatgaaagtaaaaccatttggtatgctggacattgaatccctaggaactccagataactgtggaacaacccatattgcaatgccgtcattcgctttcgtagccatgcacgggattgacaaagaccctgatctggtcttcgtaactctagatgttcaagaccaacttaactcaggtgctaaagttactgcatctaccttggctttctggatggaacaagccagactcagtacttcagcatgtcatattgtagaggcattaactaatcgtaagtcaaaactcattgcattccgtgagggtaaacatcattgcactaatgaactaggttctaattacaatgcttatttcatgactaagaacatgatggaattgttcctagacgaaaatgctctatattacggcaatggcccagagtttgatatgactatctactctgctaatacgttccacgccggaactaatgaagcagtcgttccgtggaaattctggaatctaggtaacgttcgttctttccgtaatctgtggatgcaagcaggccataactacaaagaactggaggccgaaggtgctagctgggctaaagctaaaatggaaaagatggacaccattcgttatggaatctatccagttaaacatgacccagcattcgatgcgttagttgaaagttactgcgttgcacgcatgatcgaaaaaatcaaaatttgatttgctttcagctccaaaattctgtataatatattcataaatttgagaaaacaaacaaaaggaaaatacaatgccagtatctaaaaacactcgtaaaaatggtaagaaagctattcgtaatctgggtctgcgtcgtatggctgaacgtcagtctggtatccagaaaatctttaacgtgctgaaccgcgctaatccgaaaattgataacagttctgatactgttctgcgcactctgctggcaatcggtctgtaatagaccgctttgaaaacaaattcaaatctcaaacttcatataaggaagaaataatgactactcgtatgtctaaaactcgtgctctggcaaccattaagtctctggaagctaaaatccgtaaagccactgaacaacagcttctggttgcggttggcgaaggtaaagaccacaaccaagttgttgttggtgctgcaattgaagtagaggctctgtctactcgtattgcgaatgacttccagtctctgctggatatgatgtctcagcgcgatcgcatcaaagctgccctgatccaaagcaacgcagaaacgattgttgaaatcggttctcataaaatgaccgtagcggaagctatcgaagccaagcgttctatggaactcaaggcacagctattggctaacatgcgtaagcagttccacgctgcaactgttaagttcaatactcagaaagctcaatttgatgctaagtacgagcgtcttcaggataacatgtccacccgtgacaagaagacttccgaagatgaaatcaaaatgcagatcaacctgctggaactgaagcacactccattcctgatcgatcctctgggtctggaagcgttgatcaagcagcatgacgaagactaccaggactttgcaactaacgttgactttgttctgtctgagtccaacgcctctacttttatcgaagtagagtaatgaattaaaaggctagcaaatcggtagacgaaagcccaagcatcttacctcgcagcagcggttgaaatacgaggttaaataagaccgctgaccatactataaagtataatctattggagattatgtttattacatcagactcttaatctgacacgtaaaaacaaaggtcgttggtagtaccaacacaacttcaaagatcaacgctcaagtatgaaagctgaaaagttaaaagcactcaaacttctaaacttctaaagctaaaagatgcaaagtattcgttgatgattcaaaccctaggtcaaaggtacatggctcataagatatggcctgtggcgcctctaggctgtttatcggtttgctagtctctcaatctaaaaatgtatttgcgaaaacgctataacttctgtataatatatttttaaattgatgagacgaggctattatgattttccatattctgattgatgatgttcgtaacctgaatggaatggatattatcattcgaacccccgaagccgctgttgagtttctgaatacaaccgataccactggtcatttcgtttatatggataacgatctggctgtagacggtatggaaggttatcaaattcttcgtttactcttagaatttggtcagagacccaagaaagtggtgttagtaacctcaaaccctgtaggcaaagagaacatgcgtaatgatctcttagacaacgggtatcaagagaacccaaaccgtattgaatacgattgggtggagtaaataaaagatgaaggcagctttgctactaactgctgccctagcctttagcttcaatagtcatgctacctacgactcaaagcagattgattgcattgcaaaaaatatctacttcgaagcacgaggtgagggcacaaagggtatgatcgcagtcgcacaggttactaaaaaccgtgtgaactccggtaaattccctgattcctactgtaaagtagtatatcagtctaaccagttctcttgggtatctaagagaccaaaagttgataaaaccgatgaggcttggcaagttgctaagaatttagctagagtgatatactacgttgatttaccacatgatccaacgtatggagcattatacttccatagtggcaaagataaaccgtactggacaaagaaatttaagaaaacaacgaagattcagggacacacgttctacaaacctcctgtctcaaaaacttaaaaattcgattgcttaaaaccttaaatttctatataatactttcataatttaatgagaggaaagcgaaagatgaaatctattgtaattattggtgttaatacccgtggtattcgtactactaaaacagttaaaactgctaagatttctgatattacatcaaaccctagtaagtttgacttcgctaaagtctctgcggttatgactgaaaaatcttttaatcaagcaatggaaacgaaataatgggcgaaaatattctaatgacgctgcgtggtctgcttagtgtagcacgtatccacggtgaaaaagaacgagcactcaatctccagactatgattggtgatttgcagcgtattgataaagacgttgtgactcgtgagcagtttgtagcatatcttaaagctcaagttaaggctttagaaactgcaaaacagcgtgcaatcgacgttgggactaaggttcctactgatgtagactacgaacaactcctgtattctatgctacaggaataccagcctagccagctcactgagactgagattcgtaaatactttgcggaactcgttaaactcaaccctggtattaataaaggaaccctgatgaaggcaatcaaagaagagttcccgggccgttacgacggtcgaatggctgctcagattgctggcgaatttaattaaaaattgatttgctaaatacttcaaaagttgatataatagattcatgaaaagaaaagattatcctacaagagatgtactttccaaaacttttaggtatgatcctttaagtggaatattatatagaaaactagttaactctgaaagggaatgtaaaaccttagtaggagggtatctaactactagattcaatggtgaaaggtatttagttcatatattgtgctttatcttacactatggctatcagcctgagatagtagaacacaaagataccaacaagctgaacaataagattgataaccttagaccagctaattattgtgagaacaatagcaatgtaggattaagggaagataatacttctggttataaaggtgtatataaacacgggagtaactggagagcacaaatctattgtaaaggaaagaaatacgctaaatctggctttaaaacaccagaggatgctaatgaatacttaattactctgcgcaaagaactccacggtgagtttgctagagatagttagtatatgtggggtgccgaaactgacttatgtgataacactgccgtcctagtataaatggtaatatcaaaccgtaactggtggaagatgtaggttcgaatcctacggtcggaaagaatcggataactcgggcttataccggataagcactcgctgctagagtacatactatgacaggcggacaggcttcgcactaccgcaagtagcaggttaggtcgaaatagctaaaccacaaaggactgggatgcttgctgagctacccctacctgatatatgcctcagctaacttcgcatcgaaaatcggaggtgcgattttaccagaccgcgtaactatgagagtgggaaacgctgacatgagagatgtcactaatggtgcgcaatagtacaggtaattcgcgataattcctgttgaggagcagcagtagactgggagtcatgacctaagtctaaccgagtattccacatacggagtacataaccacgaagtcaccttgacttaaactggaagatattgtctgacggcagggctgaagagcttaatctgagggggctgaccctacctaccgccgggtatctttaagagttcttgcgagagcttttaaagatacctaacaaaaggaataacttatgaatcttggaacaacttgtgtctttgatcaccaagaaatgtgttgccctcatattcttcatgttgtacacttctccgagcgtttaaccctagaagaagctcaagagaaaatgagtgaaattactggttacgatcttcgtactggagagtactttagtgttgctctagattatattgataatactcgtttgtatcatctaacacaactaggcgaagagacggatgaagttaaaaaggcgaaagacgtacttaatcgttatcgtccccaaatcctagaacgtactttgaaaggacagcctagtgattacttctatttgcgctgttatgatgcagatgctaaccagtacatgagtgagcaacgtttctacaaagagattcgtgagtttgtaaacacgaagtatgaagaactgctcgtagactctaaagctcgaatagccgctagacgtgcggagaaatctgctaaagctgctgtagaaagccaaaccaagttaaacaaaatcatcaagtaatcattcttcggggtgtagtctaagggataggcaggagtcttctaaattcctttatgcaggttcgaatcctgtcacctcggccaattttattaactgtaattaacaaggaaatatatgtttactaaaaacactaaagaactgacttctgaacagaaagtaatccgctctatcaaacgttggggtatcggtgctgtagctggtgtagctgctctggttctagctcttaactcgtacaccgtagttcaggatggtactgttaagactcagaccttcttaggtaaagttaacccgaaccctgtacttccaggcttccacattgttaacccctttgcttcttttgatacttttagtacgaaagatatttccatgaaactggataaactgcaagttcctagccaggataagtttaaatccactgttgacattactgttatgttgcagtttgatggttctaaggctccgattaaccgtgttaacgcaggtactcaggatcaagctctgaacaaatacgttgaagagaagatgctgtctactattcgtgaatttggtaagtctgtgccaaaagcacaagatctgtttgatgctaagattcaggctcaactgcaaaccgctatccagcaagaagttgaagaatatgcacgtccttatggttacactgtaaaacaagtattccttcaggacattactctgccaccagtaatcatggaacaggtacagaataccaaagttcgtgaagaacaagttaacgctgctaaagctgaactggctcgtgtagaacaagaagctcagcagaaagttaaacaagcagaagccgatcgtgaagctcgtaacaaccaagcaattgctaacgaacgtgatgcagacgctaaactgtacgcagctaagaaagaagctgaagctaacgccgctctgcaacgtaccattactcctgagatgattcgttggaaacagctggaagttgaaatgcttcgtgctgaaaaataccaaggtggtgttcctcagactgttgtcggtactggttacgatggtcagatgatcatggacatgcgtaataagtaatagccacacgtaacacttgatgtaagcccgcgtttcctccgagagcgcgggcttttctgtatttaaggaaaaagaaaagcccctaagtctttcgactaggggcttttttttttttttattacttggttccttagaaccatactctcggggtacagcaaccacccatacgggagaccaatcttgactgaaaatctactctagggggcaggataagagtaggcttaaaggcaaacggattgaacaccggtatttgtgtaaacattgctggagagcaacaacgtgctacaggcattgggcagcacgaaacagattttctgcaacacataatttctccttaggagttattacccccattttgagcttttgcaacttggctttggcagaagctattaaacttacccataagtgatacaagctgtttcccgtcctctgtctttgcgaagtcttcaaaaagggctagtactgcctgtccttccgcagaaacctgcggttgttgggtttgttgctgaacttgctgctgaggcacctgttgctgcatttgttgaggcatttgcgactgcccgctcatttgctgcatcatttgcatagggctcacacttccagggttttgctggagttgttgctgcatctgttgcgcttctgctaaacgctgttgcaactgttgtagataagggttatccagacccggaatgggctgctgggagcccattggttgattaaatccgttgttcacaaaaccatatttactcataatgggctcctccccttaaagattaggctggtactttagcctgtagagctgctagagtctgagtaattgcacccaggcttacagcgatctggttgattacctgaccgtttgcaccgctacctgcagcgattgcttcacgtagacggcattcgttcagttcgtcctggatacgcgcagtagttacaccagcgatcgcagtctgaagttcacagcagcactcagcaatctgacgttccagagcgttctggttagcacacatctgagcctgaacagcggcgaactggttgttggtctgaagagactgctggaaagcgatctgagcagagtcaaacttgtcctgtgcacgagcgatctggttagcagcgaaagcttgatccatctggcgagaaagatcgaactgaccctgaataacgttacgagtttcctgacagatctggttggacaggttagcaccagtaccatacacagtagttagaatctgttgagtgctagaagcttgagcagcacctacaccattaacagcgctcagaacagcaccagtaccctgatttgcttcagtacgagcagtgttgattgcagctagaatacttgcagtatcctggttagataggatagcgtccacagcagttccctcagcggcaacaccagcaccacgtccgaaaccaccgaaaccaccgaatccgcctgttaatagagcaccgatcaggatagctccgaataggcccataccttcaccgccgaaagcgccatttgctactgctgggtaaccacccatcagacctgggaagccgctagtgaatacgtttactggttcttgcattttatgtttcctatgtttatgacagccctcatggtcgtcatcttcatcatcatcttcatcataatcttcatgatcacgatgtttcttttcgtaggctttgaccttctcccacttatgtttgtctgattcctcatgacgtctcagttctgctgcgacttcactaacggtctcaggtttcttagttgcttcttctgtcattttttgacacctcctagtatatagaaaatgtgtgtctctttgatcactcatccataacatatactttacactaccccaacaaaaatgtcaaggggtctttaaaaattgcccccggatttctgttggggtaacaattttggggtctacccacttacctgctaccccaagtgccctactattttcctgcaaaaagtttgaaaattcaattgcttgaatgccaaattctctgtataatatatttataaatttgagagaggaagcaaatatgattaagactggtctagtaattggtaaattcgcgccattaactcgtggtcatatcaaccttattaacgttgctgcaactatgtgtgaacgtgttattgttatcgtaagccatgataatcgctggctggatcgacaaaacccacgtgatcaagaagtattgcagttgaagaatcgagtacgttggcttgagcaaacctatgcggatattgatcatgttatcattaaaagcgtagttgaagatgatgttcctgagtacccgaacggttggaaagggtattgtgagttaatcgaccaaagtatgcgagagtggggcttctataatacagaagatatcatggatcgcaactacaccatcttctctagcgagctagggtatgaggaagaatataaaaagtatttaccgcacatgcagcactatgtggtagactctgaacgtactcgtgtaccaatctctgctaccatgattcgtgagaatctgatgaagtattgggagtttctacctagcgtggttcgtaaagactacgtgcgtaaggtagttgttattggtacggaaagctccggcaagacaactttaacaaagtatcttgcgaagttatataatacttcatgggtcgaggaatatggtcgtacatattgtgaagttgatctagtcggcaacgaaagtctgttgactagtgacgattacacaaagatagcattcaggcacaaagagctagagtttgaagcagagcgcactgcaaataagatcatgtttgtagacaccaatgctttcattactgagttctaccatagactttacgaacatcgtaagaatcctgtggttacggctattgcgaaagaagaacactacgatttagttattgttctagcgcctactgtgaagtgggtagatgatggtttacgtattaactctgatcgttctattacttcagaactatttgagcagatgaaggaggagttccctaaccaattcccagagggacgtactgtttatattgactcaccagactacaaagttcgtatggacgaagctgtaaatgctgtagactggctaattcatcatgttgacgcgggagctatctaatatgactaactatcttgtaaatgacttcaaaaactggaaacctctggaatatctgtggctgttcattgcagtagccttcattagtttggctaactataatggtacagcgttagattgggctacggcaatcaccaacgttgtttgtgtgattctggttgcaaaggggcgcgtttctaactatgtttggggattggtgggtgttctgacctatggtattacagctttaaatgcagatctttatggtaacgcagcactaaacctgatgtattacgttcctatgcagttttatggaatgtacctctggcataagaataaaccaagtaatctgccagatgttccgactaaggttctgactaaagcacaagctctgctgactctagggattttagcagtaggtacattaggttacggtagtttcctggctactaccgctgatccattcccaatgctggacgcatttactgcggttggtagtgtagttgctatgtggcttatggttaagcagtacgctgaacagtggctgatctggatcgccattaatattggtactgtatacatttggcttgtaactgcccaatctacgggtgcatcttatgcaatcctagcaatgtggctagtattcctgggtaactctatcatgggagcctataaaggatactttgtacgagttaacaagtaaagtagttatagccctctaagcgagggctattatacagaaaatttcacttgctaattgccgaaattttctgtataatatattcataaattcggaagattaaccctaaaggtaagggagttgtttgctaaacaaccagtagctgtggagacacggtgtaccagttcgagtctggtatcttcctccaaattcatggttccttagctcaatcaggttagagcattcccctcataagggacaggttctcggatcatacccgagaggagccaccaattaactaggagacgatatgtctaagttccaagaactcaagcaagagctagaagaatgtgcttgtcctaagtgtttcggggcaggtgaatggaatgatgcggaaccaggagatacttggtttaacacttatgtgtgtacgcactgtaatggctctggtattgaccctaaatgtggtatttctctagatattgagcgaggctaagatggacatttatactactccggcagttaaccttattggttcttgtctcgtacatttccgcttcttccaaacggatgatagcaaagaggaatacacgtatcctctgatggattttcagattgaggacttcttccgtgaagttcgtaatatctctgaaaacttctattacggaatggataaagaggacttcgatattgagttccctattatttctcgctatttcctagagcagtctgatgctcggttcgacaagattgagcatatggaagtagcctgggcaattcagtttgaaattactggctttgctcgatatattcagggttatgaactctaaagattacatgggggtgtaatcgaattggcataggtaccggacttaaaattcgggttttgtgggttcgaatcccaccacccctaccaaataaaggaaactgatatgtatcagagaccgcctccaccagcccgaagatcaagagaaacccttttgatggagctggcgaagaacttcaaggctactcttgaggataaagaattacacacagatgaagatattgacttcatttgcaaactattaaaaatgaaaatggagaaaaaacatggctaatccagaagtaaccacacagcgtttgctgattaaaggtgtagtagctgaagcaggtcttaccgaagctgttgcagattttcaggcacagtttacagctattctcacccaagctaaagaaaccggtgcggaagagtatgctgctgcaacgctagcactcacgttagctggacttgatctggcagaagaagccggagtttaactcctccaagcagaaattttaaaaatgtacttgctttttacttaagatttctgctataatagttatataagttgatgagaggaaacagaatgtcaaaacgtgttagcgcaactggtatcgaaagctcagtatgtaaatcctggggtggctgggaaggtgagattgagtggctctatttctacaatgtagaacttctgcctgaaatcaaagctaaatgtattgaagctggtatggctccagatgctaaagcggatatcgaaatcactatggttcgactagaaggtcgtgtaattaccgttagtgatgaaggtgaagaagtcttcgaacttccgttcaccttgaaagtcactcccgacttcgattaactgatacagcactgagcaagttctttaaaatttgacttgctcagtgccataaatcttgatataatagttatctaatttggaaaacatatctgaatgagaagtaactaagcgagttgctttgaggggtaaagtcaggatagcctgaaatattccaccttgagtttaaccgacttacttttcatccaaatatgtgggaatagtatcgtagaggtagcgaagcagactgtaaatctgccgactcggaagggtctcgggtggttcgactccatcttcccacaccaaatttaatgtcctgttagacaaactggtaaagtcactaccctttcaaggtagggtttgcgggttcgatccccgcacaggacgccaattacttaggagattcttatgcaaggctctgttcaattaagagaactactccgccgtcttcatgatagtattcctgattacgcgtggaacgaaagctatgttggtgaactttatgctcttgccaataaagccgttacagagcttggtacagtagaagctcaactagaacaagctgataaactagtcatagagctagaagccaaactagaaaattactaaattctgcattcctagagtgttactggacagcatgtcggtctccaaaaccgtacggtctaggttcgagtcctagtaggtttgccaatatttgcacctttagctgagatggattagcgcttgcctgaagagcttgagaggttcgttcgatacgaacagggtgcaccaatttgaaggagatgctgatgcatcctgaaaacttctttatatactgtactagtcctttgcttaaacgccggattaataaagtatatcactatagagctagtcaacagccttatgtttatgattctagtggggagtacattccacttgagcaactaggagctgattatatggttttgaagcactttaatgaggcaaagatctcaagcgttcataaccgacaaaactctaaaacgtggtggtataagaagcgtaagaaaggcatcaaatttctgaaaaatgtagttgcttaaatccttaaagttctgtataattattacataaattgaactggagaagcaaatgaaaaagttagttaaatttaagtgttgtggctctgaacatatctttacacgtttacgtgaatttaaaatgtgtgattgtggtaaatcaggttatgatgcaggtgacggcttctatgctcgaaccctcggcaactttgatgatctagagttcgtcaatctagaagatgttaaagagccacaaatgtacgagtgttctcagtgtggggaacatgacgaatgccattgggaatgtcctacttgcggacacgatgatatgcgtgaaacagattaatacgaccgttggctgaatggcttaggcggaggcctgcaaaacctccttatgtgagttcgaatctcatgcggtcgtccaaatttatgggtcgttagccaagcggtttggcggtggactgttaatccatgtcgaaagacaacgtaggttcgaatcctacacggcccgccatattctgcctgaagtctctatggaagaaagggagtaattacccgagtaaccatgctatggttagcttaatagaggacgtttgctagagagttgcaaatctttagtagatgaggggttcgattcccgaaaacaggctccattttcactaaaactgaggaaatagatatgacaactcatgcaattgctcgactagaagctgatcgtgataatattaagaataatattaaggttcgtgaacggttggtagagagccagaaggctgaccttctagatgaacttcacaacctcaaccgtcatcgtgaggctttaaaagaagttgaggaagctatatctaaactcaaaggtgagtaaacaaattatgcgatcggggctggcttggtaatggtactcccctgtcacgggagggaatgtgggttcgaatcccatcggtcgcgccaaattatacatccatagctcaattggttagagctaccgcctcttaagcggagggttctaggttcaagtcctagtgggtgtaccaagtaatgcccttgccgtagatagaaccctccaaaggatctatcaagataggaggcttaagttccgttcgattcggaatgtggtaacccaattaaacattctagcgtggtggagaggggacaccagcttgccgagggtagaagctcgttcgattcgagtgaaagaatggttctcgtaaatccgcacaagtgatagtaggttcaagccctacctagattgacttattatgcgttcgtagttaaaaggtataatttttggttgccaaccagaagttgagggttcgatgtggatcggaaggtgggtaactccggagcttgtacaccacccgtcattgtgaacatagcaggttcgactcctgtctctccacaccaaattccttagattgtggtgaaattccacagctatgtgaagaaacaaggcgatgatttccggccgtttgattcgctaaagccctccggttaaaacgtacctacgggtagaccgatagcattggggcagacagctagagatagattgcctataacggctctagtggtggcatcgtcttagggtggcaatttcccgaaagatctaaagtttacttattaagtaagtccgacacatcggcgggtgtgttctagtatttaaagaaagtctcgcaaactttctcgctagcatgagttgatagctcggtgacttacctaataagtaaatttattaaaaatgtagttgctatttagctcaattcactgtataatatattttataaagtgagttaacaaagaatattctccgtgtagctcagtttggccagagcgtttcgtttggggcgatagggtcgggggttcaaatcctcccacggagaccaaacaatcgcgggttagatctctggtagagatcgctagtctcataagctagaaagaggtaggttcgattcctacacccgcttccagtttaatagaggatacgaaatgaaactatttcgattagtagtaagtgatcgacgttctagcaaagatcgttcaaagtatactttagctcattacggtaaagatgaaaatgaagtaatggctgaatttggtattaatcatcgctacttagaagtttactctattaaagaagtttatccatattaaatagatcgctagctcaattggtttagcagcatccgacttttaatcggaaggttctgggttcaagtcccaggcggtctaccaacttaaaggaaaattagatgataatctggttttacttaatgaaacaaaaagtcaagcagtacaacgtgttttctgctgactttactattggaatgttcttagcaggactttgtgagttcctatttgaagcgttcttaatcggaagtcttttactcggttagtttaatgggagaaccccgtctttacacggcggttgcgatagttcgattctatcaccgagtaccaccttacttaacaaggaattacaatgaaactttccattaacgttcaagcgttcttcagccatgtaactatgcagtatgccctcatgaagggctgggatatggaacaaggtctggaagagttctataaggatgtagatttagaacagccttatgcttctctgaacactggacaaaccatcacagaaggtgatatatttgaggcaagtcgaggtgtcgtaacacctggttttgccgagttttggaatggaatcaccctgaaagaagatgcaccagatgatggagttttcatgcagagtatgcactcaggaagttctgatatgctattcgttaaagatgtaaggcatatccaagaaattgcaaaaactcaattgcaaagtgcttaatttcttgttataatatttatataaattgatgaggagaaatcctcatcaaagttcactaaggtattggctcgacctaggactggctgccagaaagcacacttgcaactatacctctaatggcggggggataatttgcaagaagttctagattagtccactagattcagcggcaactgaatagtgtatcgggtttgtgaagagcggctgttctctactggctaatgtctgagagcagtacgcacaccgagctaatagccttagtaaacttaaagaatttggggaatgggtctgcatggagtggacacctcgcttgcaccgaggacaacagaacggttcgattccgttattctccaccaaatttggggtcataggttatttggttaaacttactgccttgcaagcagtggaactcagttcaattctgagtgactccaccaaacaaatggggatgtggcgaaattggcagacgcgctagatttaggttctagtcttcgggtgtgggttcgactccctccatccctaccaaatttgatgttcagagaaacctactgctgttggaaacactgttttaatgggttcgaatcccagcggggctaactgcctggcgtagtagaggcatcatcttaaataaaatggaagagcaaatcgattaggtgacgaaaaccgcttggaaagtggctgacttgtgaaagcaggcttgagagttcgaatctctcttcttccgccaaacaattggaagtacgggcgtagtggtatgcaactagtcttgaaaactagcccgctgtagtgatatggtgatggttcgactccatgtgcttccgccaactaataaggaaaaccttatgaaacatattgttaagtataccgaaagtgaacgtggctggggtggtgaaatctggtatcgcgggtttgattctgaagaagaggctagagctgcggttcatgatactaacaagaatctgccaaaagatcatgtaccagactactacattcaagctaagtatgatggtgttaaagataaggttcctgaaggctataagttttaaataattcttggagtatgccggaatcggtagacggggcttcccaaagggcgtaagaggaacatccactcctcataagatacccgaaaacgaggctgagataaatggtctatctcgtgaaggttcaagtccttctgttccttgatacatcaatggctcaaagagtaacggcgcacctttctagagaattttctgggcgagaatccagaagtaatcaactagttgttagtgtgatgagtttcggagagccgccacaattaaagtctttagcagtagatactttaattgtggctatatcataaatggttaatgatcctgattgtgaatcaggcctatgtggattcgaattccactagccaccccaaatattgcgtccttatttcaacggaaagaatgtaaagctacgaactttacgatcggggttcgattccctgaggatgcaccaattaacttaacaaggataacaacatgaaatacttagtattgattgctgctctggctttaactggatgtactatcggcccatcactagattgtactgtaactgtcaaagatggttatggtggcactaaaattctacctgttactgcaaaacgcggtcatggtaccctggttgactataaagttaacggtgattatactggtggttggatttctgaacgcactatcgtttctacaacttgtcctaggggttaataatggctgatttctgcaaagagtgttccattgatatgtggggcaaagatactggtgacttatctggtctgattacagaagccgaagttaaagaaggttatggtgctgtcgtaatctgtgaaggttgtggtattatccgggtcgatcatgaaggaaaacgtcttgaaggacctgagccaatcgcaacggttcctgtagagtaagaattattgggatgtagatcaattggcagatcgtcggcctctgactccgaaggttccacgttcgatccgtggcatcccagccaaacaattggagaatagtgtagtggttcgcacagtggcctttgactccactagtggtaggttcaattcctccttctcctgccaaacaaatgcgtgattagttcagtggctagaataactggcttccaaccagtagacacgagttcgactctcgtatcccgcaccaaataaggaaacgttatgcacgtttttgagtttcgtaataaaaatcctaatagacgcgttttgattattggtgaaacatatcgagcctatgagcaagaagatggttcggttttattaaatgatgaaaagcaaggttatagctttcatcctgaagaaacgtatgaagagttccgtgaacagtttaacctagactggaaagcacagcttttatgtagtccaacattagctacctccagtactgtactacataatggctgataacctaaagttaaaagttgataaacaaaagaaatacgttgaggtagaattaggcgaagaacgtttaaaattaaccttcgaatttctacagcagttggcaatgacagtaatgtctgataagtctcctgtgtacgaaaaagaaatcccgttgaaatgacgggtttattgctcctaaagcattgctggcgatgcagttgccttgtaagcatctgaaccgggttcgattcctggtgggagcaccaaatttaaaaattcatttgccttctctcctatttcttgttataatattt

SEQ ID NO: 11 - DNA, 113936 bp, unidentified
  source 1..113936: mol_type = unassigned DNA
  misc_feature 1..113936: note = the genomic sequence of a bacteriophage
tgagattatcggagccacgcctctggatgatcgtttgagaatccagaaagaggtggcagaaggcggaccatgttgtcttgcagcagctcaaagtatcttctctgaaggtatttctcttaacgagctatcttgtttaataatgggaagtctcattaacaatgaatcgttaatagaacagctagcaggacgtgtacaacgtatagttgatggaaagttagacccgattgttgtagacttaattatgaaaggaggtactggattaagacaggcttctggacgtatggccgtgtatcgcaataacgcatggaaaactattactatgactccggagaaagcagtacaattagcaaaaattgcatttggcaacagctcctaaatattgtataatatatacataaatttgagagagaaagtttcggatagattgacaagtccgaagcagaaaaataaaaattgtacttgtcaaatcctcacaatatggtgtataatatgtacataaagttgagagaaaaatgatattctttgattatgagaaaatttatctcttagcaagaggaaactccgacctaatagtcaagttatttaaaagaatgcttgcagagcctgatgctcaccaattactggtcggatcttccttcatcatcaatgaatcaacgattattgataatccaaataaattgtctaatagacaactggcagaatatctgggaattttaagtctacgaaattatgccgaatataagtttacaaacgatccgagtttggacatgcaatatgttcccatatggataccacgttctgtaattgacactaacccactaatcgcaattaacaaatcgaaattaatatttaaagaggaaataaaatatggctaagtcttggggcgaaactactggcggttctaacgataaaattgacttcctgaaattcaacaacggtatcactcgtgttcgtatcgtttctggtgttcttccgcgttatgtctattggctgactaacaaagatggtaatgcagctccatttgagtgcctgcgtttcaaccgtactaaggagagctttgttcgtggtaaggctgatccgattcacgagatgggcttcttcgagaaagagctggataaagacggtaatcgtgttcctctgaaacctaagaagaactacatcgctttcgttattgatcgttccgataacaaactgaaagttatggaagttaaagctactattctgaaaggcatccagtctatcatgaaacagctgaaactgtctgacccgttcgatattgatatttctatcgagaagaaaggtaaaggtttcgatactgagtatgacgtacagcaaattgcagcaatgcagttccagatggctctgaaagatccttctagtgctgagtctaagttgcacgctgctgatgttgatatcctcggtgaagcgctgtgtgatggtgaaggtgagttcctgaagttcgagaaagttccttctctggaagaaacctaccctgttccttcttacgaagagcagaaagaagctatcctggccttcatggaaggtcgtgagaagcaggaaggtggtgatgctaaaggcggttctgaggctggttctcagaaaggcatcgatgccgaagctgctagcgatctggacgactaataaccaaaggggagctacggctccctttatttttaacctatgagaatattatttagtgctgatcatcacatcaaactaggacaggacaaagttccaaaggaatggcagaagcgtcgattcttgatgctaggagaacggttaaatgagttattccataatcataactgtgatcttcatattgctggtggtgatattcttgatgtggccgacccgtcgtcggaagaaatagaactgcttgaacagttcatgtcaagacttgatcatccaggtaagatatttactggaaaccatgaaatgttaacaaaaactatttcatgtttatatcattatgctggtgttattaataaagtaactaatggcaaatgggacgtggtaactaaaccttatcgctctcctgaatatgatatagttccttacgatgaaatccacaaaacaaagtggaagccatctgaatcaaaactatgtttcacgcatgttcgtggtgaaatccctccacatgtaaaaccagagattgatctaacgaggtataactgttatgatactgtaattgctggcgatttacactcctatactaatagccagacaattggttcaactaaacttctttatccgggatctccattaactacatcgttccatagagaacgtacaaaaggtacgaatggttgttttatcatcgatactgatacattaaaagtagaatgggttgaacttggtgacttacctcagttaatacgtaaaactattgaggttggtgaggaaatggaacctagtgattatgatagagtaatctatgaagttacaggtgacgttgttcagttgaagtcagttaaaaactccgatctcttagataagaagattaaccatcgagttactaaagatgctaaattaaatcttgtcgatcttgatatgctaggagagcttgaactttacttccgtgaagttgagaagctatctcaggacgatattgatagaattttagctagagctgcgaagtatgtcaaagattataattaagacactgaaattcagcaacgtaatgtcttacggtaaggatattgtaattcatttcgataaaaacccagttactcagttaatcggtggaaacggtttagggaagtccactattgctactgttattgaagaattgttttataacaagaactcacgcggtatcaagaaggacgccctcttctcttggaatgtgccgaagaaagagtacgatatgcatgcttacttctctaaagatgaagatgagtatgaactccataaagttgttaagtcaacggctaaagttacactgattaagaatggagaagatatcagtggacatacagcaacccaaacgtataaaatgattgaagatataatgggcggagatttccaaacatttactaagctcatttatcaatccgttgggtcaaatctagacttcctgaaagcaacagatgctactcgtaaagcatttcttgtaaatctctttaatcaagagcagtataaagaaatgtcagaaactattaaggcagatcgtaaagaagtggcaagtacgttaagtaacttgcaaggtcaaatggccgtaattacgaagatcctcaatggtaaaaacaatctcggaagtttgcaggagcctgtagaagttccagagtttgatgaagagccactgtcacaggagttgactgaatcgaaagtcaaggcggcattagctaaatcacaagaagctaatattactaaactgcgtaatttggacaaagccgtacaagttgccgaacaatctttcgaaccctataaaaatcttcccgcgcccatgtgcaaaaacgacgagatctcgagtgttacgcgtgacctaacgattgttatttcacgtgcgggtgaagtcaagaaacgttatcagaagttcaaacatgaggcttcagcaactgaatgtcctacctgcggaactcatctggatacaacggctgcacaaaaagctatggatatggcacgagttgaatatgaccctctctataaagaaaaggtagaacttgaagctaaacttgagttattaaagaaagaacaactcgagtatacagcttacactagagctaaggatgctcttgataaagctatagcagctagagacgagttcaaaaattcaatgagtgattcttcttttgaagaactcaatgtgcaaatcctacaggtgcaaatccgacagcttgaacaggaaattgctgatggccgttccaaagttgcaatggctaaagagcataatgccaacgtcgagattgcaaatacaaaatataaaactcgattagagcagatagagaaagcagaatccgaaatggaagaaatcacttccaaactcgaaggagtagaggaagctgttgctgatctggatattttgattgcagctctgaaaaatctagttggttataaactagaacatagtgtgaaagtatttgaagaattaattaataaatatctttccattatgacaggtggcaagtttgctctaggatttgagcttgatgaaacgaaattacaagtagtaatcttcaatgatgggaatcgtaccagtatggagaactgctccactggtcagcaaagtagaattaacctagcaactctgctagcaattcgaatgctattaacatctattagtaaagtaaacattaatcttctgttccttgacgaagtgattagctttattgatacgaaaggacttgacaccctcgttgaactattaaatgaggaagatagtctgaattctatcattgtttctcatgggcatacgcatccattagcccataagattaccgtcaaaaaagatgcagaaggattttcctacttagaataaaacatggccgtagatagtagagagaaaggtaaacgtggtgagtatcaagtaagagacatactacgcgaacgtactggtcttgagtgggaacgtgttccaggttctggtgcttttggccagagccatggactgaagggtgacatctaccttccaccacaaagtggacatattagtaaatactgcttcgaagttaagtggtataaagatgataatatttcaagtaatttatttaatgttggtgaatccactctagagaagtggtggcagcaatgttcacgagaaggtgagcagatgaactccaaaccagcattgatattcaagaaagacagaggacagtggttagttgcattggatagctcagacccgatggttgacaacttaatgagtcgtacccatatggtgttaaataagaaagacatggaaatcgtaatcggtttatttgagccgtggttacatcacttatctgttgaggacttaattaaataatgagtaaatcctggggaaaatttattgaagaggaagaagctgagctggcttctcgtcgtaatcttatgattgttgacggaactaacttaggcttccgctttaaacataataatagtaagaaaccttttgcttctagttatgtatcaacgattcaatctctagcgaaatcttattctgctagaactacgattgttcttggtgataaagggaagtctgctttccgtctcgaacatcttcctgattataaaggcaaccgggatgaaaagtatgctcagcgtaccgaagaagaaaaagcactagacgaacagttcttcgaatatctacgtgatgctttcgagttgtgtgaaactacattcccaacttttactattcgtggagtagaagcagatgatatggcagcttatattgttaagcttatcggtcatctctacgatcacgtttggctgatctccaccgatggtgactgggatactctcttgactgatcgagtttctcgcttctcctttactacacgtcgtgagtatcatctccgtgacatgtatgaacaccacaacgttgatgatgttgatcagttcatctctctaaaagcaatcatgggagatcttggtgataacatccgtggcgttgaaggaatcggtgcaaaacgtggttataatattatccgagaatttggaaacgtcttggatattattgatcatcttccattgccgggaaaacaaaaatatatacagaatctaaacgcatcggaggagttacttttccgaaacctaattctggttgatttaccgacttactgtgtggatgctatagccgcagtgggtcaagacgtacttgataagtttacgaaagatattttggagattgcaggacaatgattaaaattaaactaactcatccagattgtatgccaaagattggatcagaagatgccgcaggaatggatcttcgtgcgttctttggtactaacctaaatgcagacttaaaagctattgcaccaggtaaatctcttatgattgataccggtgtcgcggtggaaattccgcgaggttggttcggtttggtagttcctcgcagctctttaggtaagcgtcatctgatgatagcaaataccgcaggtgtgatcgactcagactatcgtgggactattaagatgaatctgtttaactacggttctgaaattcaaacactggaaaatttcgagagactttgtcagttagtggtactaccacactactcaactcatcattttgaaatcgttgacgaactagaggagacagaacgtggagaaggtggatttggaagctcaggaagtaaataagtacgattattcagaccctaagatggtagctaactttgagcactcaaagaactatcacgttgcggttgctgagactaacctaaacaatgtagttctgaaagtagataatgaaggtaatgtaatccattgggatgaagaggcttttgttgaactatgtagcaaatcgcaagatcctacgcttagagctatgttagcagtgtttaatttaggtattattgctggaaacagataataataaaccccagtggacaatccactggggttttcttttacttatcaagtagttgttttaccaatttcttgagttcatcaatttcttgctgctgcttttcaacaacttcattaagctcgttaaaagcattaactagaagagcgttgacacctgcatgggagacaccaagcatactgtcttctttttgtggttcaatcttatatactgcttctggaaggacagactgtacatcttgagctataataccggcctcaacattatatgtagaatacttatcttccttgaggttacttcttttatggtaggtatacccaactagggatttaaccttttctcgagctgtctcaatcttctgtagattagctttcatacgaatatcagaagtactaacccagttacccgctgcagcacttccatcactcataaagcggaattcagcccctagtacccttaggttggtttgtccaccacccgcactccataaaacgcagtccatacctccctgccagtcctgaccccacataacagatttccatacgtttaccgcagaatctctagcaggcatttcaaccagtaaaccacaagctctctgtctccaaagatcccagctacctgattctaccgaaccccctattaaaccagcagcatctccggataccgtacctacagatagaaaagtaactctattacctacagtactacctcgggatccaaaagcatccttaacaggtatccaaggactccaagtattgttatccatagtacgtaccgctacagagttcttccaagctccagtaaacagggtagcacgttgcattctatacctagaatcattgtgtattaaagtctctaagaagaaccatgcatcttcccagtgagaaatttgttggaaaggtctggtaccaacaatattggagccagaagaaggaggaactgtatatttacagtttacactaatagtatcaaagttaaatccatttgggtatgcctgatcgatagaagttagtacaaaccattctgttaatccaaggtttttcctagcttgggaggaatcgttggcccctgtaccgccagcagcaatagataatggaatccatccaccggtatcatcacgccacatcccccattctccattgggtcttgcagtgattctatacccaactccaggagcgtacatcatagtctctgtggcagattgtttaaacctatcgatacctaagttagttctagcaccatcaaaggagttagccccagtacctccattagagaattgaacagtagtctgagcgttaaactgctcctgccaacctctccagttgcctgtaccatcaagaacgttaacccaagaactaccagatagtccgacagcatgtagtactccgtactgagcagcaccatttatatcaaccccatgacaatggaaattatatgtccaccaaccttcttgtttaggtggaccattaactactacttctccagaagagtaatacccactttggcctgctactgccacgtagtttagtatgttttctccatccggtactatttcagccaaagcaccaacagggacattaaggctttttcttgcggttttaggagtagttccacctgtgccgccgaaagcaactttcatagcactaactgctgcagtagcgctatcaattaaaccaaaatctccactattatagataaataaagaatatttaccatcaggagaagtaacaaaagttccattatcttgctgacgcaggcgttctacttgtagatttactctagcattttctagagtttttgctccggtaccaccttgagcaatagtaatagcttttgttagtgcatttaattctgtaatatcgttattagcaccttttgcagccttagtatctaaagtagtattaataccgccaagtgcagtattgatgttaccgattgaatcattaatactcttgatagcagcatcagtagcagctttatcagtattatactttgaaatttgtagatatttagaagttagtacaacagcaccagcttctccatcgacagagaaaacaccagcaaccgcagcatctctattaactacaacgtaaggcgccattgcgccggatttaggcattaaattacgtgacatagtatttccttagtaaataggggagaattactcccctatactcttacttatttaccagagtagctactagagccttcaactctgcgagctctgccttgactgttttcaattcttcctgtgattcttcgaacttaatagataagtaacgaactgctaaagctgtatcaatagcaatcggattgatatctaaggctagagtatcatcattgtaatcaatgatcttaccttctacgttctcagtttcttcatcacagcaatgatgttctggtgtttctataataggagaaccaggaaccagttttacgtactcagggtcaatctggtagagatcttgggcaataacaccacggcgtacacggttatacttatctagtttatatataaatgtggtaggtttaaattgctttatattctcataagaggctaacccatcatcatagttaatatctcttttgatatctctatctgaagaagggttcatagcaatgtcgtagttaccaccccaaggatcattaccccaagtgtatatactaccattctgtctaaaagtaaatgaacgatggaatctaccatcaccatttaacttaagagcagcatcaggccatgcagcgttaccattagaaatacatccaagcccaacacgtagtgcgtagcctcctgtagatacagtaccaccagaaacaaatggagaccacccaccatcattacttgttacagaagctgcatggaaaggcgcacccatgtaatcccattctaagccccaagctccttggatacactgaccacgaaaacccctttgagcggtcatgtgcccaccgtaagagttatagtagttaaactctttccaatctgtaccagcgttgttaactccaatacggaagcagtctaagtcctgtccacccccacgaatacctcctacctgccagtatccactataccaattcccttgaattatgttagtccagctaccaacacctggatcattattagggccaggaacagccatatggatttccctattaccacctgctgtttgttggatatagatcttttctccacctttgatccatccctgagccgtaacactattccctgcattgtagttagcagcatgcacatcctgtaatccagttaaatcaccagtttcggaaaattgtatgtaacggtttacgccattaagagtgttattaatgtgtagggttatttttgcgaggtttgattgcatctcatgatatattctaccttgagtaacaacattttggtcggattcctttactctatttaagttaaggataccactattaggtatattttcataattagataaatctactcccgcaaatctaggcgtatgataataccctaacccaaagttgttaagtgcagcacctttatccgtagctccagtacccccagaacttattggaagagcaacgttaacttcatctccattcttccataaaccccagagaccatcattagtaatcctaatctcgtgggttcctacaggactttggaaagagttaaaagctccaccagcagggttatcattgcagaaaactccactaacttccaaagctttcttagctgcaccaactgtagtagctccagtacctcctttgttaataccaagagttccctgggtatcattatttaaatcaggtttattagcagtaccataaagaatattagtatgtactgtaggagattcaccatctaactgattgtcattaatagtaccaacaaaaacaacaccactagagtactgaggacaaataaatgagtgagtatcagcagtcttagagtaaaatcccgcagaatatgctggtagcccctctattgctgtgtcattcctatagtatccagaaccaaaagctctacatgctttaaagaaagatactaagtcaggctcatttagcgcaagacctgtaccacctaacccaaaagcaccacgaagcaagacctcaccgttaataccgtcccaaacgttcttagtaacaacattacctagagaaaggtttccgttttcatcaggtataatatttccgttgaccattgctacgtaaggtagcttaatagcaccagtatcatcagcaggaccaattccgttcacggtagtgatatatgggatctgttccttaatagcaccagcgtcttcttcgcccttagttggtgcacggaatgcttgtccttgcatcatatcaggtaaacggaatgtagtagaaccatcaccagtggagaagtagagagttgcaccagcttgccattcagcttctgaaacagaaggaattaggccagcttcgatagcttcccaagtatctggatagtctacacgaagtacttcacgaccatcagcaggtaaaacaccaggatacccaacaccagaatctttatcataagggaaccaagtaacttcacctagccataaagaagggttaccaccgggaagggtgatctgcacgttaccagcatcatccgcatgaacgttgttgattgatacaagtttctgttcaatttctactagctctaaaataggagcttcagctgtaccagctaccttataccaaccatattttgaatcagtttgattccaaactaaaactttttcatctagaactcggtttgcaacatcagcatcagcttctgctttagtcttataaaccttgataaaaccagaaatatctactttatcaagtttaccatcaacaacctgagttgcacgatctgcttcggctttagcacgatctgcctcagcagtagcatctacagctttatctccagcttctacagcagaaccagcagcattagtttctgattctttagcatttagttctgattgcttagcagcagcagcgtgttctccagctgttgtagcagcagcttctgctcctgcttttgctgtttcagcaccagtcttagcagtttctgcggctgtctgagcctgttgcgcagcagttttagcctgttccgcaagtctacgactagtttcagcattttgagcagctaattcagcagaatctctaaatcctttggattcttccgcagatgtagcagatgcttcggcactcttttgtgatagacccgcttgtctttcagcctcagcagcagatgccgcagattgagttgctgaagtttgtgaggaatcagcatagatagcagctaggttttctgagtccttagcatttgtttccgattctttcgctgcaatttcagaatcttttgcagcagcagctgaagctgcggatgcttccacagccgcagttaattcaccagcagtaatagaactaatagagttacctaaaactactgtatacttaggatacttactagcagtagttgtggtatcatctatgttcagaatctgctgtacaataattttagttctgattgccattattgagttactccatcactgatgtagactttaccttccatgatacggaatgaactgacttctgagccaataacatcacgagtcattagaatgtcatagtaaccagcgaaacgttgtcttgggttatatttatcacgttctttagatgctttattaccaatattggtaacgtcggaaattgaaagactaatagcagcggctccttgagcagcatcaattacacgagttttaaaggttgctagagtctcagcatcttcatcaagacttatcttaatagttccacgaagcgaatatcctgttaagtttacaggaacttcagttggaggatagacactatcatcaacatccataaattgcatgataagaccatacggtactttctcatcaacaacaatatcaattactctattttctgtactcattattttaccttatatggatatacccagttgctaggtctatcttcattctgtagtaggcttccgggttatcagacaacgccgcgtttctatcatagataacgttaacaccaatctgagataagaaggcattatttgctacaatcttgctggcggttatagtaccattaacaatcatatcgccatgtagcaccattgcaggactaacccaaccggatccattccattgacgagtaaatgctgattgtggagcattactattaaactcagtcagtacatcatatctaacaggtggactaccaaagttgttttggaagaaagcattagcttgtccatcatcccaaccaccaagaccaggaatacctaaggaatacatcccaggaccgcgctgcccatcatgaccgatagtaccctcagtaccactccattgaactacatctgaccaactagtacctgcgagcagtttattagtaactggatcaagtgtacctgtagtcgcatagatattttgagtcatatctgtacgattaggtggagtttttgaccagccaggaggtggatagtcttgttctaacggttttgcaggaagtgaggttgctaacttataaacaaatactgtttgcttaccctgcaaaccagttccgatatcaacatcaccattaggcgttccaataactaccccactagagatacgtaaaacatcaccatcataacgaatccactgtgtggcattaccaatgtctaattttgctttggctgaggcattatccatccccatccagataccagagttattatccccccaagatttgccttgagtgtagattgcaggattatccttaccagacaagttagtcataataaagtttgcagcattaatatctctagtaattactttaccatcaacgttaacaacacggtttataggatcaaaggagattggagctttaccttcttcgtctagcagaccaatgttaatagcaccagttgcagcatcaattaagaatgtttgcttccatgtaccattgtcattaagtttacctttaatgtacgcatagttaacttcaatacccgtttcattaacaaagctgttatcaagtggagtatcttcatttagtatgaatgttacaggagcagattctgtaatatcttgtttatcagggccccaggcaatcgatgcaaccttaaaggtatgatcaactttccatgggaatgaaacaatcgttgcagcttgggcagcacccacgtttatcttttgggctttagtccatccagttctagcaaattccgcagaatctatataagtaactaagaactcacgaacgttagaaccaccaccttttaaccaatcccactcaattctaacatcataacgttctttaccgtctgcaattctagcagctttaaaccgaatgttagttggagcagtaggtggtacgaaattataagctacagtgaaaacgctaggatattcataataaccagatgaatcaactgtaacaccatccggcatcgtaacttgaccagatattctgatcttatagtcgccaacaggaacaccaccaaatttgatagtagttcctagtgcacctatgtaatatttaacccattcactatcctctgatgcagtgctttttaattcaatagtgcaataactagcttctccagaagtttctacgacaactattggagcaccaacacctacgtcaacaggttctgattctgatcttgcagcagtaatgataggtctctcttttgttttaaaattagtttcattggagagattaataccaatttttgcttcaagaagttcttcatctataatcgagtcatagaaagctccctgaacctgataagtggatgagggagttaaattgttgatcatgacaaagaaagtatcgataccagtataatctcgtctctctacttcttcgccaagctttagccagaatgatctaccgataacgtcgtagtcggtgtagatagaatgctggatatacgcaagggtatatccagtcataatactatttaagaccatcttggctggtgcattattcgaaatcatttaaatagatgcccaatccacagattgctcgccattatcaccctctgctcgtatacggaaacgtaacttcctgttaattcctagagcatcttcgtttagcgaagcatagtctgccttattatatatcagtagataatcataaacatattgatcttctattctgacacttcttaataaacgatctagattatcgtagatttcgagagtgtagtagattccttcaataatgtcctcttctggaatcctatcccaggccagtttaacatctggtcctacaaattccgatgcatctcccgaagcagtattaataactctaaagttgctaacaacacttaagtttttagcagagtttagttctactgataacgttactggcgaacttcgtctaccattgatatctactgctcgaatctcgaagattgccaatccagcaggttctccaacaatttcttggatcatcctagcatttggattagtctctagctgctgtacgatatacggatcagcatggccggagtgaacaatagaatagtaaacaacgttatttgttaggctaggtagccaagacaactcaccgttcttaccaatagctccaacagtaccgcccggagttggtgtgtaaataaagtcccttggagggagaacgttattgcttacatcaggaatatcattaccactattatctacctgctcagagttaatgaatacatcttctccgtactcttgtagagtaatattaatcttgccttctctagagttttcaacttcatccactaggaaatatttcttttcccagccataacgatcatacgtaaatgcaataggatcattaggctcaataccaataaagtggtagggtagagaaaatgataaagttctagaatagcgagacttcttcagctctctatcagcaaaactacgtgcagtgtagtagttagtaatatttgcgaaggatagttgtaacttcttatctagtcccttatcttgttctttaaacacggagttaaagaacgtaattgagttagttttccaacttagtgcaggatctaggatagacgcctggacagagttaaacttgtttcgaccagttgtatctgatagttctaagtcaccataggtgtctaggaagttaatctccagcggagtacttgaatacttttcaactgttattctatactgacctgacaggttattaattgcaccaccataggactcaaggagaccttgcacgttcttaaatacagattcagcagtatctactatggtgttcatctgaactatctgtctattatctttagacatatcagtccagccagtgtatctccaatatggctgccaagattgctgataggattcatcaattatatctagaatcgaagcttcttggattaactgagtcaatggaaactgatcgatagtgatattagcaccgtaacgatctgaagttaagtagtccagagtctgccagataccattcaaactagtagcattagcaaccacactaccatctggatgatagatcttaacctttttaccttgaacttctgcactaacttctggaatctcagttctattctcattaatagtaaaacgaacgactgcatatgcagtatccagaagcttatatcgttcatcccagtactcagggccattaccataactgttttgaaggtagaaacctttctctttggcaatgtttactagtacttcagaagcagtctggtcagctttaccatgataagtccaaattctgatatcaccgttgccatcgttatacttatattcctgaccatgtacagaaggttcagaagttgacataccagatgcgatacgttgcatcgtgtcacctgctgttttcttagtaccgaaacaagtacgagctgtactatcatttgcatcgatacagatcatagggacatcgccgaagtagaaatctagaaatccatcaatttcaccttcacagaatgcatatacaacataaacaatgtttggattatttaactcagtatctgcaaatactggaagccccggtattttctgcactccatatactactggaaggaatttggctgcaaggttaaagtcaagatccacttctttagttacggtctcataatatttcttaagactataacttcttgatagaccgaataactttttcttagactgtaacttatatctttcttcctgcacctgatacttagccaagaaggaaacactcttgttagagtggaaaaagccatagtcttcctgatactcaggacgttttgcaccatttgaaggtactaactcaccagcaacaatctctagaccacggtgatcagcatcgtcagtataacgaccgtttactcgatcgaaatcgtagaactgatttgaacagttccacgtaattactgaagtactaataccggaagtagctacgttatctttgatacctccgccagtaatcttaccacggaagtatagaagaggtccatttgtttccggatctacaggaagaatgttaccatcttcatcaataacagcttggtggattgagatagttctatctaggaaggatacaccattttgaacgagctttaatacttcatcctcggctgtaccggtaatagtaaatgaaaggctaccaacggaaagatctctattttgtttatgtgttgttatagacttaactttaccagatctatatagtatgccactatataccacatccctgaagtagtcagttagatagatataagaagcactagatccagtagagctaggaagctcaagagtaataagacacgctgtttttattttattgtgtgatcttaaatactctctagctgtgtcaagaattttcttcatagactttccctcaaggaaagtgaaataccagaataagtaccgttattatttaacgtagaaccaaaactgtctccattcataagtttagttctgaataaaataccattgaatactggcttttcactacctgtagtagtaatgaatagatcaggataaatactcagattccatgagttacctgctgtagtaatagaagtgattttatatactttagggtgattagagagtttaaacaaatctccaggcttaggtaatccacgtagtgtccctttggtatccatcataatagtggaacctttttgaccagccggaatattcacagcactagtgtcaccacggactctaaaagcttcatattgaggcaataaaacatcaatataatcacccgttcttttataatcaagtataaatgagtctaattttgcaaactcatctgggaataattctggataagagatattaataccccaatattgagcagacaccttaatctccctaacagtaccattaggtaattcatcacgaatcatagggtcattgtctactaagttaacgctttcaaaacctaaccctgatagttctgggttcgtgtatgggtctggtagtctcatagttaatttctcctcttaataacaatattataataggattggaaaattttatcaagaaatttttatttttccataaagaaaaggaggacataaagtcctcctccaatattaagaattaccaagtgatttcagggtggttccattctcattaagagcctgttctacggcatccctgaaagcagcgctgttgctcgaagcaaaatctcggaagctcgccgcatccatcgtactgatgttcagcacaataggtctacccgatgtgcctctagatgagcctttaacctcatcagctggagtggccttcataggaaccataggagtaactacctcggtaccatgttcgcccatctggtagctaacgcctggatacatattaccaccttccgcacgcggaacaaaggtgttagcgttaccaataccttgatcaccacgcatataagaaagttccccagcattagccgacatagaaacgtcgacgttcttctggcgctctccaagtgttaagtagctagcagtatcaccaccagagtctccaatattagacataccagatgcagaagatgcctgagctaatgccatagcacctgctaatccagccgcaaccattaacggaattgagaatggatatggtactgcagtagccgcctgcataactgcaaccgctgtttgaatgataatttgcttcttagctgcatcttgctggatcttaagcttttcagcttctaacttcttgatcttcgctttagatgcctcagatttaccatcacgcttctgttctgctgcaatagcctgatcaatagcacttacttgctgaccaacactgtactgaatcattgaagacacagtttgcataccagcagctactaaagatgtggtatccagtgacccctgagagaactgaatcatagcattagttaggttacccatactttgtgctactgcagttgcttcagagtttagttcagatagtttagagatagcctggtcataagatgccattctattctgcatatccatattggctttatcatcaccttctagtccagtagtaggtgtgtaagtaccaccaacagaagaagtaacagcttgctgcatctgagcatcacgttgcatcttgagttgtgctagagctgccgaagtttcttggattttacgcttgtactcttcctgagcttgagcgtttccttttgtaatctccaatagactttggtacagagcttgctgttcagttaaacgctgagattcaccagtaacgttacgttcggtttgagataatcctaaagctctctcgcgcccactagccatttccatctgctggtcttgacggaacttccagatttcacgttcaatctgtgcctgagcacgtcttgattgttctgcatctttttgtttgtcgacctgcttagagtaccatgcgtatttctctttctcgatagtcagttcaaggttcaactgggctaacttatattgagtatctgtcatagtacggttgttaagcagagcaatctcacgatcaacaccaaggatcttatccgtgtagtccttgaccttcttctgagcttccatgttctggttagtgatcttgatcctttctaactggatcttagcaatctcaccctcaatcgccttgttacctttgttagtttccagtacacgcttaagagctgcttcctgttcttctaactgttgaacctccagacgtctaccagcttcctgtgctttttctttatccttagtctgattgtacacttcggcaatcttctgttgaaccgctaactgatttttagtttcgttaccagtcagttttacgtaaccagcaagcgcttgagaagcagttttcatttcacttagagtattataacctaagttcaaactcttaacatactcatcagcattcttaccagtaccggcagatagtgattcgatagtcttaattgtatcagccaacgatgcgctagtcttagcagcagtgttagtattctgagcaatgttctgaatatcgtttgctaagtcacttgcagttttcttagtctggttatatgctttctgttgttccgtaagccctttcagggttgccgagttaaagtcataaactgcatcaggatcatttgcatccttctgtagattaatctgcttctggaattcaggatttgccttagcagcagctgctccagcagcttgatacgcagatttccaggctcctaagttttcagtagagtcagcaacttccttatcaagacgctctacctgtagtgccattgcagcagtatcagcaacgaacttcttgttttcttcggaagcaccaagtgctgctgcacttacaggaacaccttgagctacagaacgaattgcaccagcagtaaagaagtcggcctgttgcatgcgcttatctagatcagcttttaacttattacgcttttctagggattctttatacatatcaagagctttattatatccggcttctgatgcctcaagccccagagccacagcgccaacgttactaggatcaatagctctgttagtctgttcctgtgctctagcagcagttgcagaaatagaagcttgagatgtatagaatactgcattaatagagtcaataactggaccaagatacttagcagcagcttgttgaattttacgtaatgcagcatcagcgttagcagcgaactgttcccacggagttgcacgtaatacttcatccagatatccgaaacgtttagtagattctgcgattactgcgttagcatatgcttgctgcttctggaaggtggatagactattgatattataagtaatacctgtgttagcagcgttaagctgtttaacatagtcagagaacgcatcattaagacgaatagtaacaccaagttcatccagaagttcgatttcttgtttagatacacctttgattacacggttaagtgcatcagtcatatctacaccaagaacagcagcagcacgacgagctactagaccaaatttattaagttgttcagcatcaaaaccgtatgcagaagcagaggatgcttgtctcattgcttcttcaaaagaaattgcataaccagcagcttcttgtagagacctagctagggtttgtacaggagtacccgtttgagtaccaacgatagtaccaaacttctctagacggttcaactgatcacccatcttcagctgttcaaacgcagattgcagaacgaacacgttagatgcaattgcagcatacattagaggtaaactaccacctactttagccatagctgcgaagtcacgagttgcaccacgagctgaaccagaagtattaccaattgctcggctagctcttcctgctgctgtagtagtatcattaaagcctctagatgtaccagataaagctctgttcgtatcatataacctatcctggactttctcagttgcagctgcaacatcgttacccataacttttactgatttagatacgccctcaaaacctgtttccattttatcagcaacttcaatcattgctaaagctaggtcatctagtttcgtttcaattttagccatagaggtggtaatacttgccatacccctacttgcttgcatcttcgttagactcttagctgctctatccgccgccctctcaatggaataaagagttttgggcatctttcctaactgttcattagtcagttcagaagcggcagcagcattctctaacgcatcagaaacactttcaatagattttgcagtacgggtagcccctttctgctttacatctatcagtagttctcgtattagcttatcagtcatttatttttcccaataaaaaaggctctgggcaaatcacccagagccaagcctcatcgtggaacgcccattggaggaaacttttactgagctcgagatcttccatgaggtttgatgttcggagtgcgaccattctgtttcccatgtttctcggctctcttacgagctgcgtctactgctttcgaatcaaatatattgatgatatgtagaacgaactctttctctatcggatccgtgatcccatagatatcaaataaaacacccaacgcacttttgtctttacctataaagataggaaagtcacccggtatgaaacaatcaataagactgttataaatttgcatactagtagatacgataggtggaaaatcttcgagttcaacaggcatcacatcaggatctggttcgatacccattgactcgcacattattaggtattgttctttagtcattttagatgccgaagacttgacgcatttatctgcgaatttggcaacggcatctagaagttgtttacgcttttgggctacgaaaagtgtctaagtggaacactgtctggttgatccaggaatcaaacgcagcagagttctgcattagcattacagcattatcgcggctaaaaggaacttcagtagatggatcagcttcagtttcaatcagcatcagcttctcaacatcaccaatagtcagaccagtccaacctttgatagcagaatcaacgaaagcttcaatgaacttgtcatcatcctgaacctgtaacagtgtaccattaacccattcgtcacgttttgcagaagcaataacacgcttagaagtggcacgagacatgtagttcaattcaagcttaaagttaggcataccagggtaggaaagcgtaacagagcgagtatctagggtaatatcttttaagttaatcatttctttatttctccaaagaagtcgattcttaccggatcagaatcagcagtaggaattacatcccactcaatcctgtatagatccgagaattgtaggcgttttgttatacgtgctgaagggaaatcaatcgaaatatgttcatttcggatagttaaagggatatcagtttcgggttcaatattgtagaacatatcaccagcaaatcgcttagtgtagtaaaacgcaattgttgccgaagcattcatctcgttaacataagctcttttattattatatattttgtttatgtcaaatacacttttatcttctctccaagagcattgctgttggaaggacatagaagcagataaaagagcaggtaaaatattactgtttgtagttactctaggaggactataagacataacctcgccctgaacaataccagcaggaggatacgtagatacctcagaaaacttaccagactcaataccaacattcagcactggaacgtttttatcaagagagaagtcaacgttagatacaaaacagttttcaaagtatacacagttattgtctttattaactatgtatatattaaacattgttggttcaatattcgtgctataaagtggtagcaggaaggtagtaccctctctatcaaagcccatccattcaaagaagttagcctcagtaagggtattactaaaatttatagccagcgatattgatgatggagtttgtgcgttaataacagagtcagcatagttggttctacgatgaatagtcctacgaagagttttaaattcctcgtaggaagtattgatatcatagtttgacagagcgtcaaagtgatacgctctgccatcatactcaactataacttttgactctcgcattagagagtagtacatttaattagccaccagaagcagtaactgtaatgctcttagtaccttctacaccagaaccgtctttagccacagctttaacagtaactgcacctactttagaagcgtcagcagttagcagaccggagtcaacatcaatagtagccgctgtaccagaagagatagaccaagttacggccttattagtagcttctgcaggcagaacatctactgtcatctggagagttgcactattttcaactgtggttgcgtcaccagcagacttaacagtaatgccagtaactggaaccggagcagcttgaccaccatcacctgtagcaatcaggttagcgatagtagttttggtatacttattagagaaaccaagataaccttcatcacctgtatccagatcggtagggatagccttgaattcaacagaagtaccaagtacatcgtcagtctcgatagttgggaggttaacgtgggcttgcttagcaactagaacagcggcagggcgctcatcatcgtactcaccgccaagaaccagggcaatttcgaaacggttaactactttcagggtcttaatcagatctttgtacaaatccatagaacccagagccttatcgttcagataagcagtaagagaaccggttagttcgaatgcaccagtaaaggaaccgattggaatgtttacacgggacatgatattcggagtcagataggtgatgttgttgttgattgtgaagctaccaccagtgatcggaatatcatatgccttaccactgtccatatccttaatcttcaggatagtcagtttgttcttaatataagaactttggatagtcatgtaagtttcatcatcaatacctacagtatcagggtcaaatggctgtgaatccagtggaatcagctggttaccattaccagaccaggttacgcgaccaatatcttcgatatctacgtttacttcggcttggttgatctgacaggaatcaatgtaactccaggctttatcggtaaggatatagatgtgcaacatagccagttcgtggtatgcgttatccttaaagttaaccatgaagttagtttcgttagtatgagccccagtatcgccatcgagatcgataggcttaccactagaaagcgcatgccataacatgtagtctggaacgatctgcttactagtagttttatctacgtaaggcaggatgtaagtagaaaagctccactcagcagcgttcaaggagtcgttgaaacgttttgaaccacgagttggacgcggaccagcttcgttaacagtaatatcggttgagttactgtcctgaccccaagaaatatcatcttgaactagaatctcttgcgtgttttctttggtatgaccagtcttaaccgtagacacgaagattcgagtattacgtaatagttgtaaagacatttatttatattctcctaatctgtaacttatctgcgtaatgcacgcttaggtggcatatagcgcactgttacatttatttccgctaaaccatatggggccagtagaccctcatctgtactaactgacgtgatgctcatatcagttgcctcgcatgggaaggtcgatccattaggtttactaacagtatattctaaatttccacctgtgtcaatgacggtttttatgtcagctacgagtttttcaagttgctcttgaatatctgtttcttctttgtcatagaccagaattggaagttctaaaaacatccactgttgacctgaaggaagatactgcccagtttcagttcctatatgaactgccacataaggaaattctcggatctcctcaaatctataagtttgacgagaaacgtttccataaaggttgttaaaatactcatctggctgagatccgtccatttgtgtggagattcggtcaaccagcgcttgtgcaatacttgttctgtgatccatttattaggttccttgattaaccttgattttatatctagagtgaatcaggtctcttgcagctttagctatcgcttccccaataagtttttgtggatttcttgctccagggtagggacgtaaagatagtctgcgataggtagatactgcggggttgaatactgagtaaggtctaaccatataattataggtcacattaagttcaggagcactacggcttgtttcagcgtcacgtaacataacatctttaattttaagggagttggcgaagcgaccagttctaaacttcaaaggtgctcctgctttcttcatatccttaataagatattctttagctactatttctagtatagctttcatattactatttgaaacaaatcgtcctgctgcacctgtaactgcacctgaataaccatcttcagtatctctaggatcaccaaagtttacctgaaccctaccagttgaacgtttcttaccaacggcggatctttttcctgccgtggcttgtatgaggttttctagagcgcctaagtcaccagaaagatctaagttagcggaaacagcctttaagatagaggctgttctaacatttaataagtcctgtgatacaggcttagagaatttgaatgatacttgcgcaacagtaccatctctttttggatctttaagcccagtctcaacagtgtacacaacagtgttcttattattttcagatcgtcctgctgtatctagctgctctttaataatctgtctagctaaatcagaaagagacattatactctcctgtagacttcgatgatagtacgaatatgctcaggaatacctgacttagtattgttaaacgttactgtttcaccaccaatagtcttggcttgacgataatcttgcttatgccagtgatccactaatagacatgcagccaacttgagatcttcaggcattgggttgaaaccaccttgtgtatattctacatccatatacccttctggtggactaaacttaaggagaataacaccatctggatacagtttgtactgttccgggtctatttcattctcattaatagtcatctttgtaactgatgtagcagaaggagaactcaaaaagtatttcctacggctaggtttagtagtgattaattgatctaccgcatccgcgtcgtccatacctaaaaggctagtaatcagcgtattggcagctttaatcatcatatctacttgagtttcaatttcaggacgttttgcattagcatatagtctgtaatcttcaacagtgatgatttgcatttatttttcccaataaaaaaggagagccgaagctctccttatcggctgaaaagcctgtattaagatgcagcgtaagcaccagatacaacgccgttctcaaagtaacgttgcaggttaacacgctgagtaacgtagtatgcgtcacgctgtttgccagcttggcgctcacgttcaacagtaacagcacgctgacgtggcattacgaagttgtccttgtagacgattactgcgaattctgcagaagcagccttagctgggaagtattcagaaactacaactggcagaccataaatacgaccaacctgaccctgcagtttaacagcatcgttaccaacctgagcaacatcctgccattcttcatcttccagcagatcgtaataagcatccatagatacgatcagtaccagcttagaaagcttcagaccgtgacggcccagtttacgacgcagcttagagatagttttagcagttaccagtacggaaccgtcagctttagcttcggtgataaccttagcagtgtcatcagcagccagtttcagaagacccttaggctgaccagtaccagtaccgttcatgaaggcttcttcgatagaaacagcgtgtgcttcgatcagacgcttacgcagcagaggcagcagggagaagatagcatcttcttcagtttcatcagtgatgaaggacttagcagccagcttgtaagttttgaagctaatttcagtcaattgacccttaacttcatcaccaacagtttcatcagtaccgaatttagaagcgtctacccaagtagcacgaccagcttctggttcaaccagcatagtaaggattttgctggacattggcagttcatcgaacagtgcaccgactaccagttccttctgcaagtcacggataatacgagtagagaagatagtttcgtacgcttcgctagacatggaaacggaagaagaaccgtttacagctttaacgtgagccttaccgtgttcagtttcgaatacgtccttctccatcatataagacagaagaaccagtttctcaacttcatcttcgaaagcatcctgagtgccataaagagctttagctacgctatcaccaacgaaggaacgaccttcacgagctgccaacagagacttgatttcgtcctgaagaccaacgattgtttcctgctgcttctctacagtctgtgcaaacagttctgcgctcttcttagatttttcatccagagatttaaccagatccagtgcttcttccagcttcttacgatcttcaccgacagccttagaaaccaggtcattcatacgagccaattctttttcttcctgctcttcacgcagacgcttagcttccgcagctttctgagcagcagtcagaccttccagagatttagccagatcacccagaccaagttcttccttcagcttattaatatcaatagtcatttttaaataattctccgttattctttaacgtagcctaaagctatcgcaagtttttctagttcagaaagattacgttcttgagctgggacagctttagaacttgttgcagtaaaagatttacgccattcagtgtaatcatgaccattcatactcttagctaggttaaaagtagagtcttggttacacggtacagaaactaccgagacttcgtatagttctaaatctttaataataaaaatatcagtagcttcatcccattctgcatctaggcagcggaatccaatactaaaagttttcagtacaccgtttttaattagtgagaaaatcgcagggtcggaagcttcataaacttcacattcaatctcaagtcccatttctgtaggattaagatcaatacacttaccgattggacgacgatggtcgtggccgaaaagaataatcgggtttttcatgtagttagtaagtgcatttgacgttttccatgccgaagcaggaatcacgtcaccagcgcgatctttactaattgtattagcgaatcctcggatcttaacgacaccttcggactcgctatcaatagacttaacgtaagcgtctaaatgaaccggtgctgattttaacttgttatagtcaatcgcagcatttgtcatttattagcctccagcagcagggttaacagtagctacacactcgttagaagtaatggcagtagctttactatccgttactacgactttgtaagtacctgcatcttctgcagccgcggtcgctttattgaagttagggccggtagcaccacttagtggtgaaccatctttagtccatgcatacgtgtatggtgtagtaccaccagtaaccgtaacacctagattaattgccgcgccttcttcaacagctagagttttagccagattctttgtgaaagctagagccgggacagccggagcagtagtttcgtaagcttctttgaacttattccaaaccttgcggttggtatgtgcagtggtcattccgaactctttacgtagagtagcatagtttggaacaaacttgtgtgctgcaaccgtagcaaagaagatatgagattctggtaacttctcaccaaaaatggccttcagaccatcataatcaatcattcttcatccccttcggcggaaccttgcggtctaccaccttcttgaccagatacacctgtagcagaaccagcaacgttagcaggaatacgaatcttattcatctgctcatcatctaaaggttcaaggttcagctccatacgagcttcgttaccagtcatgataccgttattaaccagagaggttaaatgtttagcctcagcttccttatctggagttaacgcaactacttccttagtatcaggagtaatcttgtaaccaaagaagaaagtaagagaactagtcagtttgttcagcataggaacgattgtcatgtagtagaacaattcgatgtttggtcgaatattagcgttattaccaccatcaatcagaacttgcggaacaccaaaagccagacagacgctcttatcgaaacgttcaatgtcgtctttaaagtctagatctttaaatgaggatatttgggagtacggttttgctttcataccaccatctagaatcaggacagtagactgacccgtactaggattataatcgagttgtaattcttcttgtttacgctcacgcaatttcttgttcaggatttcatccgtctcaagaataagaccaatcactgtaccattgtctaggaacttctctttaaagttaagcattttagaacgcttctcaagagagtcaataacagtagcaacacgagattgtccagaaatttgagagtttgtgccacacacgtaactgttatcctttataaagataatctcatctacgcgataatctatctgattattaaatataaattttttgataaacttattggcatctgcctcgacctgcataagagcagccgggacatggtaaagtgctgtgccatcccaatagatgtatgcacaaccttcaaaaagtaggtcagtgactacaagtctacggaatgtgcttatatccatgaatggattaggtcgtacatttaagagagtgtctagagtctttgccttgacgccattagcgtacgtgacaatattatattttgctccgacagtgtaagaacactcagccgcactatcaataaccatgttagcagttcggttgagaatctcaatcttactgtaggcttgacctgtggtaaaaggctttcggttagtacgatgactaactggttccatgtctcttataatacgttgacccggatttagcttttcagtaatccagctttttaaacccattataagaaccttgcgaatcctgatttagtttcagtcttgacttgtgtctctttgtgaggattctgtaacttttccttttgtttaagaacccatcccttctgcttatttgcagagaaaaggggaggttctttagtgtacaccttatgtaatagttggtgatggtggacacaaagggtaacagtgtcatctactagctcatgcctatatctttcatagaatgccgtcctatttgagaggactgtttcttcgtcagtgaaatccaactggagttctttagcaaattttttaactagtagagacactgtatggtaatgatgaagctctaattcttcttcacaaccacagatttcgcagcaagcggcttttttatattgactttttatgccgtctcgcatgagtgatattgcatcacgtttgtattttacattactcgccacagtattctcctcaactgtatgaatatagtatacataatcatgtcgaatttgtaaaggggattttaaaatgcaggaatgggataccaactgagtagtatcccatcctatacttatttatttcccacgggaaattgagtaaattccataacgcagggcgtcacaaaggtgtgaactcgcatcatgacgtggtttttcacgtgataatttttcttcaccttcttggaaatcccatttgtagttggccagtgcatgaatcagtgaggtacatgaagcatctacaatgatcttaccctgctggaagagtgcttgtaggcacgccaaaccatctaggacagatttcttagcaggtgcggaagcaatctcatgctcatatgccaagtcctggcggaactgagcagcagcggagtccacaaatatacgatcaacgttataacgatctatacaatgctggatgtaagcagcatgttgggcagtagttttctctgcctgttgatactcttccagtacgtaatagatatcagtatcgtagtgatatttgatagtaagaacagctgtagggtcgcggtaaccaacgtcaataccaagtaacgtttcgaatgcttcatcatctttaaagaagtgacgcatacctttgaggtctttaacatgctcaatagcattgaaggtgtcaaagatctgaccttcgaatacggagaagtcagcctcatattcttggcggaaatagtttttactaacagtacgacgagcttcctcgatatcgtttaggtcagcacgtggattatcacgatatgtaccatgaatagatacccaattaggcaacgtttcgttaaatcctttctcgtagaactctttgaaccagttaccaccacgaggtgtagagataaatagagctttagagtttggtttatctagggtaggacggagctgaatgtcaaacgctgcgccaccaacatcggaaatcgctgcttcgtcaaagataatgaaatcatacgaacgtccaactgcggagtcagcttgcgccgcagaagctagtttgaacagggaaccattggccagttcaatttctttatctttggcgttctcacgttcagtctgcaatccatacttcttaataagacctcgaatctgtgaccaaccaatgtttgcaagtgagtagttaggtgcaactacaagcaccttcacattgggttccagaagtttcaagaagcccaatgtgtatgcgatgaatgacttacctacacgacgtgatacacacgctgttacgaaacgatgtctaggatcttccagagcattaataattgccacctgaggggcattaggtgtaatcccctcttgagctaggatgctagagactggcagacgaaagaaacgtttgtctataccaaagtcaataacatccgtagtgttaatatacggtcttgagacctccattaccttttacctcccgttgctagcgaggtaattaagtccatgtagttctgatcaccagagccagcaataatattattctgaatattagtctgattagtaggagcacgagtagcagctcttgccttctccagctctaccatcatcttcatttcttccatcttcattttatgggctttccacagaatatccatgatatcctgatcagatcccataccagtttcttcaagttcttccagcttacgcttgataacttcatcaagaaccccaaacaacttgtcacggttgcggaatccactttccataaagatatcgttgagatagttcttaacttctccacgattcataatatccctgaatgcaatttccgacataccaagactacgggcagccatgcgtacatcgctaccgcattgtaaataagcctcgattacatccatgccttcaggggacataagatcaggtactaaaacatcatttgccattatgttaacctctgaatattaagtcttagtttgtggtattgaacccacggagtatatgaaacagacagaccgctcattggcaatgctctagaagttacccagaactctagaatattggaagcgttctttctgatataatattggaatttgtttcgaggagcaccagctgcacctccagcatatgaaatagtattagtagttagaataggtacaaaggtatttgtatgtaatactacaatttggtgagaaacaccatcacctgcatcgtaatcatacttagtcaaacgtctagcagcacctacatatgggccactacctgcaccactagcagcattgttaccaatacgctgcatgtttacgtcaccatcagtatcacatagagagttacccatccattcaatacttaggagaatcgtagaaggttcgggactaccacctaaaccaacatcaactgtgtttattagtctggtttccccatacgccataggatacagtctaccattgtctccaagaataatattattagctttattctgagtaaataattgtagaggccttacattaggactccagatatccacaccattaatagctattttattctgtggagagttaatctcgatattactgttttgtggaagtcggtataatccaatattccatggtgttgagttacctaccgtactacctgtattacttccagtaaatcctttcaaaccaccccaggcattagcaccaaagaatctgaaagcaccaccatcatccatttctgtagatgaccaggcaaacacgttactagagaagtaagtattactaatactaggagtaccggtactaacagctgccaacatttcgtagttggtatttcttaaatcaactcctttaattataaaggaatcttttgcaattttgatgtcattaccagtaaatagattttcagctgagtaaccccagtagttatcaaacgtaacattcaaccataggtattccatacgaactggagtgaatgggtagtaaacctcactaaatccagacatacgcccattggcaacatgacgttcggcaccagcagtcatgtaagcagaactggagttagccattggaatctggtaagggaaatcaagatctctatacttagtaaaagccgtattaccataggagtttggatcacccatacccgtagcacatctagcaccgcccgctctaacatacacggcgtcataaacactactagaaggcccaagtgggtgcatgtaatcagggtttactaggttctgactatcttcatagttcatgataggacggctttgagcacgtggtatccagttagtatacatataccaatcctgtgggtcacgccattggtacataatccaaccacccgccaggtcatagtaagcatcagcaacatagtcttcaccaccttcgtggtcgaatataatatgtccaccagtaccatagttaccaatctgatcccagacagcaccaccctgtttccagtaaccccattcaaggttcaagtcaaattgaatagatccagtatattgaccccagatactaatattctcataaaggttacgccatctataggtgctattcctctgaatacctgtcatctgatggtagtattctgtaccatcagcattatctcgtactactaggactggaagaattacgtttgccctgtttgctagaagatagctgaggtcagatggtaaagctccagtaaagtaaccgttacctgcgttccctaaacccacctgaaaacggcgtttaacaaacatgtggggcatatctgaatggaagatggagtttgtgttgggactgtaatgaacgttgacgtctcctccactagccctatttaaagataggactgtttttccatctgtatattttcctgcgaagaagctcataaaatctcaaaatttcacttgtcaacaagtctttatttttatataatataagtataaattaaaaaggcatccaagtaaacaaatttttttattttctggatgggtcactggtagcaaacactatgcaagaagatgataagccctttcaggagcctctaccactagaaatgaatcctagggctaaagcagttcatgatgcaattaacgaaatcatacaagatgtcatacaagatacgatggaagatgtaatgggtacatccttcatactagaagaatccggctttgatgaagtaatggatcttatcgggacagtcgttatggttcgtgcaattgctagaatatttcaaataccacaattaagggagcaagatagacatgtcagacgacaacagaagaaagaacaggcgcggagaagtgtacgaaagttggataaatagtttcggattcggaacagtcctctttcttatttttgtattgttttggttagcagctatggcggggtggctttaatggaagttgtgattattgttttactagtggttattatcctaggcatgtgtgtaatcgacaatcaccttgcgagaattgaacgtaagctgcggggggataaataatgtttgtaatggtaattgtcttcatcgtcggggtgcttgcgggtattttcgggacggctgcggcaatcaacaggcatcgcgagtatattgcggaggttcgccgggagtttgcggaaagggagcggaggttttcggagaaacgggcggagttcgagcgggagtgggcggacggatctcgggtaagtcgtcggaagtttcgcatgagtgaatcgggtgataaaccagttgacaggagaagttcatgaaagaattcgggcagtttagtataacccaagaagaacttgagaagatgggcgtcacgcaggagatgttacaagtttttcctaagtcttcggagataccagagggatttatggcgtttaacgatgctatagagtacatcaataatcttatcaaaactgatcctctgtggcaaagcgtgctcaagcagtcagcccgtaaatagcgctaaattgacttttgccaaattccataagattacacatggaggtgtgcccagggagactctagatgagaatgagtctcattaccgccccggtacttagcaagctaatagtcacggcatgttatcgtttcataccgtgactattttatttttaattgttaggcgacttttaatttatcaatgaattgttgcggagtgtaattatattctgctctttcttcgtcggtcataccttgccagcacatttctaaacgttgcgctaggaattgataatcgttatcatcatctaacgattcatcaataaaggtttcaccgatcaatgttaccccgattgataggatatcattaacggcttgagcgtccagcgttttaaatccagcacttgccgccgccgataatacacctttatgatcatcaatcatcgtaaaatcagcattagggtatagctgtttaaacagttcaaaataataagatttataaacagcgtctttgctgtgatatatttcgctaaccttatccgcttcgaaatatttatgtaaagtatcgcgggaaaatacgcgaatattactatttccgcgccctcgcaagccttgtttgcgcaaataaaaataatcgcttttagacattaagcgcgcggtacaaataatatttaaagtatttgcatcattcatacattggcgcatatattcaaccaatggcaataaggaatcttgcataattaaatcatgtttgcaggcttcgcgggaatacttaactaaatctaaattcccgttatcatcaaaacaaggcgctacgcggtggaatgaattgatgattgttccgtctaaatcccaaatcataacgcgggaaatatgcgggaaagcgcgggtaatattcatgttaacttgattcatttgttacattctccatttaagggatttagggttaattcagcattacccgcttattatatcaaagcgggtaataattaactaacctttattcactcaggccatacgctagagcatcagctataaagctaatatcttcacctgatacactggaacgaatacccgcgcaagtgtagacctttgccgataccgttgtatcatcgcagcacatagggcaaggcgcgacaactgcaaaggctagaccggatttaagagcatcaataattaccgtttccattttaacagtatcaacataaacgccacgcccttttattttgcttgattccttgccggtagcataagcaaaggtagtaacctgcaatgcttcgttaaagtttaacaaatcatcgataacgtgacctgattcaacgtgataacgctcgccattagaataaaccagaacaatagaggaagcggcgcggtcgaaaggaatatttgattgtttcatgtttataactccagattatttattaatgggatttaaatttatttaatgctcaattgcatttgatacgcggttaattcgccgttattagttacactttgatcatctaaccattccataaaatcagagtaatcattaaaagttaaaacgtcattatcgcgggtatcgactgcaataatacaacctgtatttgtcggactggctagcatataatcaaattgatatactttgccgcactccatatcatcaggcgttatatactgttttttatctagcgttttaggtaatacaacattcattttaattaaccttttattaatggcggtatatttcaaccgccgattaaatttaattatgcaaagaatttaccgtttttgaaatcaatcaaagtacgttgcccgtttgcataggtaattaaatgcgtttgcgtccagctactagcgccgacgttgtaacccatatcaagggaaccagcaacgccagcggtataaacgccgccgtaaatgctagccgtgtgagtgtgaccagtgttaaggcgtcccaactttttaaactgcttaggattgccccgactgccgttaatgccgttgtgaccatgtacgccgcattcaatgccagcgattttaaaggattggtcggtagtcaggaaaatagcgttaaattcgcagccagcaacgtttctaagcgcataatctaacacgttaaacgtttcatcacgttctccaattgcggcgtaaatcgcagcgtttagacggtggtatagttcggcgtttgcgggatcgtctttaatgttagcgttacgatcatctagccagcgtgaaagcgctagatcgtggttagattcaacaatgattgtctgactaaaatcacgctccattgattctaaaacgcgtccagtgtcgataagatcatctagaactttatcacgtccggcggcgtactgtttagccaagaatacaccacttgcgcggttatgatgattgcgggatgtaaaatcatgcacgtcatgaataaactgatacttaggcttgagaatatcaagcaaactgttttcactagcccatgacgcaacggcgcattcatcatctaatttttcggcgtgaatatcgccatattgcaagcctaaaacgtgtcctgtaatttcacggcaaccgctaggagtggcgcaaacattcaaatcatagaacattccgctttcgtccattgtttcaagctggcgaacaaaaaattccccttcgtcgtcaaattcgacaatgagagcgccgaaattatggagcgcttcggctttttgtcctgccttttgctggatgtagtttttaagcgtagccgttccggttgaatacatacggcgcacaatttcaccttttaacgctggcacactttcagcggtgattttagcgtgaccaattgccagaccttcaatatttaaagccgtggcggtttctgcgaatcctgaaagcggataatctgccgttggtaatacgttaatttcagccatgaaagcaaagcggcgattatttaaaaatacgtttttctcgcaaatatatttattaaatgcgctatcgtatttaatgccttcgttaccttctccattctggaagccgtttttattataaatgaatttacaaaccagcaattcagcgccgcaatattcagcgtatttttccagacttgctaaaaagtttttatgcgggaaagtattattttgaatcgacgttagaataaaacggcgaccggatttaacttcccattgttcaacggtactagaaacaattcccgccgcttcggggcgatcatcatttttaatcgccttttcagctttcgccgctttcggtttcgctggcttatttgcttccagccagtcacaaatcgcggttgaatgtttcggcgtatcgtaaacagcttttgaaatatcgtcgcaaacttccaatttagtagcgcgtaaacgcttaccgtaaaaattgaaatcagcggcaagtttaacgatctgggcttgtttttctgcggaaatattcataactaattcaactccattaaagggatttaaagattaatactggcaatattgccaaatataacgccttgcctgaagtgaggacaatttaaaaggcgttataatttgcaacatttaattaatcggcattaaactagaacaaaagccaaatacaatgccaattgtcaaaaagataatagacaagtatttttgaatgttcgcgtttttgcggaaattatttgcggcgtaaacgttatttattccaattattgccagaattgaccgcgtataattcagaataaaagcggcggcaataataaataaacctaaaataaacgcttcactaggataaaagatcaatttattctccttttagggatagcggggaatattccccgctaattagaatttattcacctgcggcctgttttacttcctccgctacgccgagcaattgcgctacagcgtccagcgtttcaagtttagcactttcaaggcttgccagatcatcggcatctttcacaatgccgctatcaatggcgtgtttagcaatgacgcgcacatagtgagctttacgaacgctagacccgccgccaactttacgcggtttatcgcttttctggtacgcttttgcgcttgtcagtttagagcgtacagaaacaggacttgcagcgccaacggcggcggcaatttcttttaagccgtcactattcgcaaactcaatcccgcttttagcgaccatttcagaatacatagaaacagccttttcggtgttttcttcgttccaagaaaattttgcggttttttcggttttaacgttagacataatatattactccatttaagttttaattaagggattatggctagaattagccgctatatattctttattcagaatatataacgaaaactctatattatagttttcaatttaaagcccgtcatattatcggggcgcgattgtatataatacgctcgcctttgttcttacattgtttgccaatttctcgttattggttcgtgttagctcataattgccgctcaaagcatgatattttaggtttaaatattaattatgctacggcttgccatttatcatctttttggatgattttaacagcatcgccagaatttaaacgaacattaaaagctgttttaccgcttttagttttttccgtttcggcgtataccgcattaatagtatcccacggatcaagcgccgccccttgcaatttttcaattttgcccgtttcctcattcagtttagtaatgaatggaacgaaaacggattgaccaattttaggggaaataatgttttgcatttttaatactccggtttattggggattattccacaataccgatttgatgttttaaatcggtattagattataatccgctaggagttagcctaaacattaccgtttttccatattgttaaagagcgttactgcttactacggggaacatcttaaaacctatcggctagagtgtcaagcgtttattttgttcttttcgtgaatctcttttagattaatcatcatgttatcccaaatcatcggtaaaccttgttgcataccgcgtttataggacttgaaacggcgtttcatttctggctgcattatttctaaaagcatatttgcttttttatttaatgggctagctggtttcgcactaatcactaaagcgttttttgatttgatcattatcgtcgattccttatattatataagtttaccgccgataggctttaagatgttccctaatttttaaagagcgcggcggtaaactttcccgccgttgtagtccgttgccgtcctacgagataaataataggttattccccaaattggcgcaagcgtatttttgtaaagaaacgtaaagaaaaacagcgtccagcgacggcctaaaattaaatgaaacggacgcgcgaataacacacaaataaccagtttagcaagtaattttttcatttatttctgctcttgcctacttgacaaaatctaaaatcctcgtggtgaggagatcggcatagtaccaatgcacttgcctagcttttcctcaaaggcgcttagaatcgcttacagagcgttttagaccctgttaataacttatacaaagagcaaaaatgaaatttaatgagttatccacttgacttttcaaaaaagtattttctgctgttattttgcattgacaaataagttaagctatgtattggttagctagcagactaacaatcgctaggatgataatcacgctggtggattgtaacggttgaaatcattagcagactactaatcacggaaaatcctattagccaactaactatttcatattatataatatacttataaattaaagagaaataataacaatatgaaactatcggtcaaatgagaatcactagcatttaagttatccacagagatattcacagcacaaaatgatttgacacgataggaggcatttacaggacttatccacagacttataaacaggttatcctactgtataaatatacagggtagaaaggtagcagtaacaaccacaatcaaatttaagcggcctaaaacgctctacacggcgttttctcactgctacccttattataataaagccttgtgtacgcttacagagagctagaaatagaaaacgcgcgattagcacaaaaacaagcgttaggcaatgaaaataaaaaggtaaaataaacgttgcccctagcgaacaaatatctatatcattcactcaccgattaacgagggagacaaagaaatgtctactgtaagaattgcagtacccgcaaacgctactattattaaaggcggtttgcgcaatctgttagatggtagtagcgcggcaagcgtacaacataccgctaacattgttgaaaaagtacactccggcgttttggattatgaggacgggctttattcaattgatagctttactcaattgctagatccgactcgggcgcttgtactttataaccgtgattatcacattttccgtaacagtcggggaagtgacgttgattttatcatcgttggcttttgccctagtaacgatagttacattgcgcgactatataacgtgcaagaaaaagagcaggtaactgctactaaagtaaatagtatcaagttcgataatatcgaaacgttactatctagcatttggggcgatctttccaccagctttaagcggtcgaatgatgaagccatagcaacaacgggcgttgtagtatttgaacgcgctagtggtaacatgctgattcctaacgattattttgaggatggtagtaacgcctcaaacgttgcaaacgctggatttacattaaaaccagttgacaacgtaacaaaacaggctgtaaactctcaaacttcaagcgcaaatgcgcaaactactgaaaataaaggaaatattatgtctaaagtatcttctatcgttgccgctaataaatccgccgttgttaacgctgctaaactggaagcgggtaaaattgcactgactcaaatcacaaaagtggcggcgaaaaaagcaccgtttatgattaaaggttatattgatacgccgattggtcgcgtagtgatcgctaacctgttaagcgtagcggttgaccagtacgccccaactaacgcgaaagctaaagcggtagcaggcgcggcaatggaagcggcgatgttagaaatggtacaatcttttaacatcgctgaaatgatcgatgaaatggtaaaaggcattgacatttccacctttaccactaacaccgaaagcgagtaataataactagcggggattatttccccgctttcccttttagttaggagactaattaatgtcaaagtatggcgacgttgtaaccggatcaacaattgatcatccgatcattgcactagtgtactgttacactaatacgcatggtgaacaatgggcaagcgttgattatttccccgctggcgatattgaaacgccgttgcatgaaatggcaatggaaaacgcttccagttttagcaaccatgaaatttgccagaattgtgatgagtctgctaatgattgcgagtgtgatgattccaatctggtagaaaatccagatgtaggcgcaacggcgtaccgctggcaattcaccaaaagttatcaatttgttaacggcggtcacggtgaggatgaagtatataaagccttgctagaattggggattgtccagcgttttgataatgaattgcatgtttatcaaagggcgctagaaaacgcttgctatttcccgaaagaaaacagggcgctagaatatcagcgttttgagcaggtgataagatctgaaagtgagctttacggcgatgcaataatcagatatatgtaaatgtaaagttttgtaaaggtcgccttaatcggcggccttttttgttataatgcctttacaccatttacaggagggcgaaagatgagcattaccaccgcgtttcatatcatggctggcgtgatcgctttcgcttgcctgttacctttaatttttaccctgattctaggagactaatattatgttgaaaaatgtttcgcttgcccgttccaaaggttttaagctggtggatgttaacacgtttgagcgtccagattgtaaaatcgaatatgtagcacgcaacaaaaacgctttccgtgttacagaaaagaaatttgacaagcgcggcaatttgatagccgaaacggttaaacactttgctactttttacgctgcttttcgtggggtattatgagatccttatatattgctctagcgtttgctaccattggcgttgtttgctcattcgccgcatttgttttaaaaatgtatctgatattttcccagctctaggaggttgacaaatggtaatttatgaaggcaaccgctttatagctaattgccgtccggcattgttagcaaactatttaaatcagctttcccctgtttataaaggcgtggttaacatctatgaaggaaaagcacattataagattaatgccgttgtcgctcgcgagcttgcctttcagtttcttacttttaactcatgcgatattcaggttatgggtgaacctttgattgcagaaaatgaaaatgagtttattgacattttccgcaaagtatgcacagagcgcctgataatgaaaggcgcatatattcaatcaaccgctgatagtattgaaacagcgtttcggaaaattgcgtatgaatagctggtggcgtaaaacgcaatcccataaatctaataataccgctgggaaacattcccagcgtttacgatttgggaatggctttgcaatgttaataataatcattctcattctaggagcaatggcgctatgagcaataaaattgttataaccaaaactacaaccacggttgatactttctttgtgcctgatacgctggagaataggcaactagccgaaagaggggattatgataaactgatttatgataacgatggttactatcaacatttggtagactcctacggcgaaagcgaaaagatcacgcatcgactaccagactaataataacggggcgcaactatcggccccgccttttctgcctgcaaacaaatttccccttattaaaatacctcctccaaaattaaaccgcttagaacgcgtttgagagcgttttagacctatattagagttattcactacataggaatactgtatatttatacagtagaataacctgtggataagtctgttgagaacgcctcaaaatcgctaggattttgtcaagtcaaatcgtgctgttgataaacctgtggataacttaaatagcagcgtttctcacttccctttctaaatgcaaatcattctcattcacattcaactctataaatgataaccattctcattccaatttctaaacgcgaatcattctcattcgcattcaacttctcaaatgcgaatcgttctcattatcattcgcatttcggcaagcagggcatttttcatttgccctgcgcttttgtgcaaatccgacatttgcccccatggattacgtgctggcgtgtatgtgcgaatccgacaatttttggtagtgtgcaaatccgacccgaaaatattttatagtgtgcgaatccgacaatgaattttcctaaaaactccagcaatcacgagcgtggctcgattcctgtggaattaactagaatatgtgcaaaaccgacatgggtttatttgtgcgaatccgacaagattttttgtgacttcgatgagagggtgtgtgattgtgtgagtttgtgggagagttgatgcaacgagagaaaataagaggagaaacggaaggggcagcggtggtggcgtgaaacgccttgtttgctgcgtttttggggataatgtgggatgttttgggaagatttgagattggtcgagataaagtaaaattttattagttaaatggggcaaaatcgcttgacaagtgaaaattcctgtggctctaaaaactcaggcaattatgggccttcggcccgaaataatgctgctattttcagtgttcctaaaaactttggagactcctatcaatgtgcaaatccgaccataaatttctagaaatgtagtgtgcaaatccgatgagaaattccagaaatgtgttttcaaaaaatgtctcctagaaataaccgccctccctataaccgccctgtattaaccgcctattactagagtttctaggaacaatgaaaaccgcctgagttgacgagggttttcctagaaacttaggagtctagaagaaagtgttgtgccatcctagcagatgagcggcaacaggtgtatcatcttgaacgttaatttatctattcaacagtattagtttttatataagtataagatcccccagggttctcatatagagctttgcccctgccagaaggtctcgtgatgtttctagtaatctttattaaattacctgttgacttgtcctgtcgctccgtatcctacgctacaagtcagtaatttaagattcctgaaccaccacaccttctgtgtggcaactctaaatggttaattttattaactcatagagttatgataacatacattaatctatctgtcaacgagagtttttattgttgtctcggtacaggtattgtgcaccgagacatgcagataattacagtaactcttggtatgctttctggtacgcctcagtatccgtaggtgtatcttttgcaattgcaattaattcatctgttatctgaatattcgtgttataacgtgagtggaactcgtcaggaatttctagatatctattaatgaatgccgcggcaagcggtgaagctatacccatctctagaacccatccaacttgtttctcatacttaacataaggagattctgtttgagtagaagttttggtttccttgacttctttagttggtaggattggattttcataacgtgcttcttcaggaatagcagatctgcgttctttataaatataagtttctagatcagatgctttagatcctgaatacactgcaaagacacttgctttaccttgtgatgctctaattggtagataacaatttgggtagcttctcaatgcatcatgaaaaggacttccagaatattgataacgatctccatataaatcatcaatattcattcgttcatcttcgaagatatggaatgcgctaaatgatggtaacgtgaaatattctgtctctagcgcacgaattaagaagcgatgtgcatatgcactgatcttaataactgtgtagggtttctccccttctttaagggcattacccttagatgtaacttgataacgttttccaaagaactctactagacgcttctcatttaaagataatgtagaatataaacgtccattcaaccctagcaaggtgtcaaacataaatgctagtttatctttttcttcttgggttagttcagggaacggcaggatcttagcattgggaatgttatttgtttccttagcttttcctttaccagcattttgtctcagtttgtccttgaaattatatgtactcattgtatttcctttttaaggtcagatgacctgctttttattttaaagcctccgtagaggcttatgtgttgattaattaaatcctttactattattagtcaagtcaacaagagcttccataactgcatcagcaaagctgtcatttttactagatggtgtactcagatgaatagtataagagttcctagaaactccagcatccgctggtgctacgcttcgcgtatcagattcaagagcttcctgagtatgtcttaactgtatagaagggctgtaatcttctccaatcttataaggtgtggaagtttcgataacaccaccacatttaacactgtgcatatccgacattaatcttttatcagaatttgtcattgctgtgatatacccagaacctaaagacggtagctgcatactgttagtactaggacgatttacctcagtcttcacgagtttgtatccagcatcgattagagcattaatgaggttgtcagctgggatacgtgccgtgccaaagatcttacgagcatcaatgagtttgctttcgaaatctttacaaccttgcagatcagtgtgcaaaaagtacatcttcatggatttgaactgaaccgttgcatttaagtctttaaagctgtagtcccctgtatctaattcatggtctgctacgattttaatagattgttgtgtaaacattatttattctccagtttgtctaacagcttgcgagctgctatactatattgtttaagttcacgattgagaatctggttctcactaattaactctagattcttggtattgagactactacagcaacatatcaaacctagaattgccacgagagacgctactaatataacgagaaataatacttccattatttaatccccatgtattttttcaggtaaacgatgaagtcttccgctttatgctcttggctaccttgagccacaaataattttagagcctcacgctgttgtttaagattagtgacttcgctacgcaacttcacattatcatcaataatctgattggcttcacgagtcttatgcacagcggtgttaatggcaaagactaatgcgattgctaggataattaatacatattccatcagttactccagattagctgccagctcttatcgaacgtggctgctctattaattaattctcccatagagacattattatcatctatagcttcctgtacaaactctttaccaaaatcatttagtaaatattctgtattatttatagtaatcttatacagggttggaactagtggatgttggtgattaagtggaatatcattaacaattacctcattccttccccacgtcgtcttgaacaatttgtgggacaggagagctaaggggtttgaccaaactacatactccatctttctttaactcctgttttaacttttgatctttattataccaaattatgtgttcaccgtcaactacaaatttgtggagacatgcgggtacggtgtacacaccatattctgtaaggcgtgtcacaactttgtgtgcacataatcggcaaccatgtccttctaagtgagaacgtgcagtctgcaagaaatatccatcatgatctggacaataaatctcaacctgctgttgcatagttctatacttaactctctcatacccgaagaacttaccatgagcttcgatagctcttctaatgaatataaggtttagtgcttcttgttgaaagtctggatgtaactgtctgatcttagttctattaatagatccatcagactttgtgaacttattatatgggaatgctagagcttcctcataaagtaattcatttattttatcacgcatagtatacacaaaaggccagaacaattaagtcctggcctctagaattagtggagtttcttgccttgcaaagctaagccagcggtttcaattaatgattctgtaacttcgcgagatactgaatactcattaattgcatgacgacgtttaaaagcataggcattaacaaccagatctacagcaccaagaacatcttgaacggtgacttcttcaccattatcaatctcttcctgagtaatttcaattagttgcccaactgccattaaaaggccaataacatctgcggcttcagcagctaccattggatcagcatggtctgtagtaagatcgaaagcatgagttactatatctcgaccttctatagtgccttcctcaatccgcttctccaattgcttcatctgctctagaactggatttttcttttgagtcatgatatagattccttgtatcagttgggaggaacgagctttgctgtttaggaggatgttgttttgcaatccaattaagaatcagaacacggctaggaacgatatcggtgttataccagaagtcatgaacccaatgtcgtgcgtcttcaaacttaccgaattggtatgctttcttgaacaatccaaaaccgaaacaatcaggtgcgaaatctacttcacgataagtaattaccttagaacctgtgagatcttgaatcgccgcgttaatttctgtatgagaatatttcgattcatggaacgtattgaagaagcgataattgaagcgtccattcgtttcgacaaataactggataaacagatcattgaactggccatcaaaccagtagttttgtaatctttgtagtgctgtcatttgcgaactccatttattgctgcgataaagccttcatacataaaaggtaaaacttgcgaaacatggaaatcttgaattgtccagccagcttcttgatacataatattaatgattgcacagcttaacatgaaagctggcaggattataaagtaatcccatattgccttttgcaattgagggttataaaaattgatcatctgtttttaagtctccttattactttggcttgctccacgataatgaaaacggcaaccactaaaccgaagactaggattgccgtaacagttgatagttcaatcacgggaggcgccatttgtaatgggctgtccaaagggtttctgcttcatcgtcgtggtgcataaccatagaagctggggaataactatccgcatactctttacggatcatttcacgctcttcgccagtctcaatatctttaacaatcactttcagatgaagtggaggcagttcagacaatggtcgccagaaatcttctaatgtaccttccagctttccacgaatacgagtgagaacttcggtagtttgggtatctgtttgaatgaaaccgtcggtaacaaaacccaagaactcgtgcagtaaggttgcttctaaatgattaagcttcatctttcaggatatcctcgattaggtcagaagattgttggatttcgtcgataatgcgttttacattggtcttagtgatcttacctgcgatcatcgtcaaggctagagcaataataagaactggaaccggaataataaatagtgctactttcgcaacattcttaatagaccaagtatggtatttttgaaccaaaactgcaataactacaaggtacatcgctaagagaaacataatcatttcttaatctccgtgatgatctgggaacgaaggattttaggaggcaatttcgtattccctgctattgattctatatttgtgagcttttcttttaaaagatctgaacgtctttgcgcgtcctcgatatctttttcagcagctacatacttttcccaaagaccgttattggtaagcttcatagcttccatgtttttgctagcattaataatgccaattataccaccgattgctgctattgttgtagttactagcaatccaattagaatttccgttatcatttatctgttactccattactacacttaatgtaggggcttgtcattctgtagaacttaatttttactaaggatgcatcgcttgctctacagaagcgtctgccctcttcaatctgaagtttcgcctcagcgatatcatccagtttatatgcatcaataacttctacaccagaatacttcgaaagaccctcgtctaggttagcttgataacgtatatcatatgcttctgggttagtatattcaattgctgagaaggataaaggtgcatcctctaccttatcacgttggtagagcataaaatcagtaacaccgagcgtgatagctacagaaactagggcattcagccctagtacaagcaagaattttccgttagtcattatttcttacctttcagttgtttaacttcacgctcaaaggaagctgcacgacgttcagcagttgcctgatgctctttcgcaaaacgtgcttcttgtttagcaagattgaatgccatagcgttcttattcagagaatcatacatcttcttcattgccggaatggacatcttcatcagctgaccttccagaccctgcatatccagcaggatagccagtacgtttgccatttcgtttttagtcatgttttccatgtttgaatcctctctcattaatttatgaagctattatacagcattttgaagcatcaagcaagtgaatttttaaattaattaccagtcattcacaaaaccggagaactcagaagcaaataccgcttcaaacttttccgcaatctcaggatgatttttgcagatcagctcgatgcatttctcaggttccataccctcttcctcaggatcaccgtaatacttgtcccaaagatcatcaggaatgatacgttcagctaggtcttggaagataactaattgataacggtgaacatcgtccgaatcaagaatttttaccaattcttcatctacatcactgcgataatcagccatcaatagagcattacaagcgaaacattcccacatcatcaaacgctcagaaatcggattagatttatcttgaacgtaagattggaagataactttgaaagtagctttgacttgctcaaatttatctgccgctgcggttaagagtgctttatcaatcttttgcattttgattccttctcatcaatttataaagtaattatacagaaaactaagcgttttagcaactgaatttttataataaaatacctattcctacgccaagtaagaaagaaacagcaacaattattgctgctgctacaactatatcacgagtcattccatcaaaatcaaacatcatatactcccattgctaaatctccagcatcaatttcagatacaacaccagttactggatcaacaatcttgttccacgtctgaaacttaccagatacgatatcttctaaggaaataggtgtcttactcatctcaaaggagacgttgatatagcgttggtcacgtacagaattggtgtgcacgtgtccgtggatgttcagcttaccacgaagttcatccgggtggataggtgcgtgggatagccagaactttttgccaccaccactttgcttgtctagagcctgaacatcatcgtaaatgtctactagatcacgaatgcgaataccctgacgttcagcatcgtggttgcccataataagctggttaggcacattatggataaccgacttcaatttggccaatccttcacgccctacggcaatatctcctaccagcacaagttttgtacgcttgccaatgtgcttagacaaggtatctaggatatattcatcgtgctctttcatattcttaaaccacggacggaaacgtagtgttccaggatggtctaagtgcaaatccgaccagaatttaacacgcattattcattcctcgcaaattctttatgtaattgttctctaaggatctctagttctttagcggcatcctcagccttttcatggtacttagtgtcgtatcttttatctctgaaacgaaccctgcctacgtatttattgatacgtttatccagatagacacctttaaatcctgaagtattggaactttttataccaacattccaagtattttgagcactatcagcagctctaaggttactccagacattatttgttcttattgtatccttatgatctactttagcaggtaaataaccttccatatacaggaaggccatcctatgcgccccatgttttataccatcaattgttagattaatgtatcctgtggttttgcataaagtgcctgcttctttacctgcaaatctggtattccatgttttattagcatttggattaggtttccactgaaacttccctgtttcaggatcatagattagtctactcttcaggtactcctgagaaatgtcagccattaaagaaccttctgagcatagttattccagccttggcagtaggagctgatacctcttagcaggaagatctcttcatgaatctcatgatgttcctttgcatcagcataacctttgtctaattgctcttgacgagcttcctcataggctacacgattctcaatcattttccagacttcttcatactctggccaatcgtgctctactacaactgtcttgagatcctctttccctcgttgtgctcgactaaaccacaatttggataagatatgttccaaagtagtaaagttactttgagtaatatgccctaattctagggctttctcaatgtcagatagctttataactacataacgttcttctcgttccattatagaatcctctgtacaccgcagctatcatctttgtcagtggtaaatgtcatgatcttaccggcttcatcgttaacctgcgcaaccgtcaactgcccgttgaaaacaccgccagtatcgagataaacacggttagtgtacagaatcgggtaagggataccagtatggccatggaatacaaagtccacaccctcaacttctggcacttttacagtcagttcatctttaaatcctgcgtaacgctggaagtatggatgttccgcaccatttttagccagatggaacccaatttcctggatcacatcacgatcccacaggtatggctcaatatagtgagctggatgatcatgggggtcatttttagatgcctcaatatgtgcaataatgtcatcccaattcggggtatgtacatcaaaaccagcgtctttgtactggaaaggaacaccagcgtgaactacaccataacgcttaccacgatgttctacagtcatgaatactggcattttagcagccatatctgctgcgatacctttaatagtatcagtatccagatcattcatagcccacataccaccgttgtacatccagttggcataatcaccaccaatcataaactgatcatggttgccacgaacgctacggaagcgtgggttatataggaatttggctagaacctgtaagttctgtgggccacggtcaataagatcacctacgccaacaacatagtcgcgtttaggtttgtagcctgccagtttcagggcatcttccagcatatcattacagccgtggatatcccctacgaagaacaggttaacgtcgtctggtactaccagagtttcatgcagattaaattcttttttcattatcgagtcatccaattagtgtgtttttcagcttctgtatcgtttggctcaaagacaacgtgacagtcaaccgcttcccagaaagattcacggataatagcattttgctctgcaatatccagttcttcccactcttccattgtttctaggtcagtatcaacttcggtatcagccccaaccaagcccaaagtaacaacaatagtaacgcgaccttcacgttcttcgggataagcctcagcatactcccaagcagcttgttcaacatagtattcttgttccttctcaggtagggacttatacttttcttctgtgatacccatttcgacagcgcgagtaccacagaccacgttgttatgtattataagatatgcgtaattcaatgtgatactcctctcatcaatttatacatcaatttatacatatattataacaaaatttttagcagaaagcaagtaataaaaacccagatcagctaagatctgggttggatttattaatcttctggattatcttccaggaaggttttgatggcctcgtgcatagtttctttacgaagctgacgtccaatcagaatgtgattggcttctacacgaccattcggcagacgatctgcgagaactactacaggaacctgacgaacgccaaatttctgcatcagctctgtgttgtccgtttctttatggacttccaggctatagtcattgactactttatcaaatacaggttcaaacatcttgcacgggttgcaggtagatcctttcagtagatatactaatttactcatgtttattaatggcctccaaaaatgccttcatcacttttacagttgctgtgctcagatctaaagcaacacctaagcactcggttacagcagcctgataaggggcttttagcctgccttccggtacttgtactttcttataagttttcttcttgactttatccagcatcgtttcaagaacattgagaggcaacttctgaccttcaatattcacgccaagctcttccattagcatggtatttaagtcaatacgagtaagtttcttgccattgctagacatacgcacacctgcctttttctcaagttttgcacgctctggtgaatcgaggtcacgtaatgcgatgttcaattcatacggagccatattgtaatggttagccatctgagtatagtaacgatctgacattgtgaactcctctgattcaatttatacaaatattatataaaaatttcggcaggaagtcaactacttttttatcttaatgtgcttgatgtgggaatctcttcctaactaaatacatagttattggataaatcgaatacataagtataggggagaaaagagtgaaataagccgtaactcccccagctaacattaacggtattaacgctagagtaagggccataagaatcataccgaatgagacagccagggctacggaaatgcaattttctaattccatccataaccaacaatatttcgtattcctctggcaattgcacttgcaaacgccgaatgtgcccataattatatactctagcccgtgaatgactctttttaacagatcattttgggtaactagtgcgacaacagttagaattatcattaacacgaaaactactagactaagtttccagatacctagcagcatcatagtgaatagttctgcaaacatggctttctcctatcttcaagttattaaagccccctttgctttaaaaggcgggacaagcccgccttaacttactatttaaaccaattccacatgaccaccgtcataggtaccacgatcgatttcatcatgataatcccctgaggcattccagtcagcaccaaaacgaagtttgacaccaagttcttttccagcttgttcaaaagccttcttaactgcccaaaatgcttctagatctttccagtcaatcttaccattaatatatggtgcgaaatcgagggcatctccagtcacatgcttactcttgctaggatctttcaggaatgaagtaccattagcaatgttttgggcactttgtgctactgtacgaataccttgtacgattgtgaagtcatacggagatagttctaaagccctacgagctactttttgtagctcaggcttaacagtagctaattgtttttcgctatttttaccaaatttaaaactcatattgatctacctaatgatctctgctgtggtgaacagagctttgttaagtactcgttaaattgttccgagtcggcattatctacgggtttatccttccaagcaacaccaatatatccagcatagatgttgttaaggttgaaatacggacacgtgtaaatataattaaatgttacgtttttaaacgaagggatatttgcccccatgtatttattaatctttacagttaaatccgaagcgtagttaaaaccttctaggtgacgtctatacatctcagacgtcttatttactgctttatcggccaagtcagccctatctaattgcgcattgctttcccatgcaataatgttggaataatcattgatagcatcgggtttatacttgactacaaaaacagcatccgcacccgtctgggagaaaagaaccatgctcttttctctcgctacattaggaaagttatctatcctttgggtttgaacatcctgtaaaaccgcagacgtggagaaagtctttaagaacgacatcacctcgctagtattactaacaaataagaaaataatgacagcaactaagatagttagcagacgtttaagaagcgatgctggatctttcgcttcttggagcagtaccgttaatagttgtagaaacttttccacttgtaacctcctctaaccattaccattatactaattctagaggaaaattacaacgtgtttttaaagatcacttctggagcacaaaattttgtcgttgtcaagaagaattttaggcaaaagaaaagccagagtcgttaaactctggcttaaaactacttacacttctccatgttcctcagggtgaggacattgagctttgctgaattgctcctcgcggtacgctgccaatttctcaatacgcttattgatttccttgctgttgagatagatattcttgttctcttttaccatatcctcgatttcttcgatggagaagaacgggaagtagatatcgagcatcatatcttctacaaactgattgtaagattcataggctttcttgatttcttgacccttctcacagaatccgccagagaacgtatgtcccataagcgtagagtgtggatgaacaacccaaccgtggcaagacaggaagattgtgcagtaagcagaagcactaggaccgagcaggtgtccaataaccgttccacgacagttagcgatcaggttagatagctgtgcagcagtatcaacataaccaccaggcccattaatcatcagattaatgacatctccttcattagcctgcaccaggatcatagataagtcacgatactcatctgctggcccgagttcctcgtcaaagaaaaaggtatactcgttagattggtgaacggagtggaacaggttagtcttttcttctttcttattagtcatagtgatccttaattatccaattagtggttctagctctaagtcacagaagttatacacttctagtttaaggttatccataccgatgaacggattcaccagttcatgggttatgtatttagctgggatacctttttcagacggatgatctgtcttaatagtgtattcctgctccgctggtactacatttatcaacaaagaatccatatctagatgattggtttctcggattaactctccttcattagggaatctcacatctgtaactattgcgacgtctgggtcgtctttagcgatggattgctccagaattatgagccaaatgcgttcatgcaccagctgccttcctaactcagtacctacaagctgtagcatctttcttggggagataaacacactgtagagtgcatcatcttcttgcccaatcaattgctgaggatcaaggtattttccttcaaaaatcggccaaatgtacgagaagtcctcaaacttatcaataccgtacttaaaccatacgtctctagctcgctccaactgagattgtgtgaccgtaaaccattggtcaatctcttttcccctgcgctctcccagaaactctggagttaccccgaggattacggatgcaagttcgtaaacgggtttagcaaaactgtaacgacgggataaacacgttggatacgtgtcattacaccagtcaatcattaattttgcaacggtatcttttcccgcaccagcctcaccatgtaaaccgactaatactgacattaatctttcctatttgtaatgggtggatagtaaactaagcaacgtttttcttgtaaatcttggcggtagaagcaaaccatactagtcagccgtgaaatgtaagagtaaactgcttcctcgcattttgctttagcattccaatctttgtatggtacaacaactactacgccatcttcgccatttgtagctaatttcttttcgaatttgaaatcaaaactacacggctgaagtcctttaggccagtcaacatgagcttgctttaactcatgtgaaggctctggttttatttcttctgcacagcctgtgattgtgattgcggctgcgagcagtactccaagtttccagttaaacatgctaatctttcctcgaactccttactctgctttttagcaattaatgtaaccaatccaggctttgcagctataatgtcttgacgactaagtgctttatcaagctgactaattttcttgtctagatctgcttgggaaacattattcattgtgaaatactgattcatacgagtttcacgaagctcactctcagctttcacattattaagagaagtctctagggacgtaatctttttagtagctaccgcaagatcacctgctagagtttcaaccttatttactaagtgataagcaccgaatccgatgcctatcgcaagaccagctcccaggatatacattttattatcccaaactaagtctacaaaccatttccacatcagcctgtactcgcaaactcaccgtggagttctttgagtttggtatctcgccattctatggcctcttccaaactcttaagtgttttcgaaacttgcttaccatgtttagtgattcttacttggtaagtcccatttgtttttctatgaatatttttaacgcctaaatggttatcgcttcttactttttgattacaagcgttatcagatcttgtagcaggtcttagattctcaaacctatcattagttgagtctttatccttatgatcaactatttctggccattctccagtatgccatgcatagattaatctatgtgtacctatagctagagaaccattatacagctcaactactctatgtcctgtactttgtctagatcctgctactgttcctgcgaatatcttattaaagtgttcgtccccttccctgggtttccagataagattaccatcatctcggtaatcgaacattcttcttagctcttccttactgatcatcttttcatattcctaaaagaagtaacagtatcaaatccatgtgcggctaagcgatccttatcggaagtggtaatagtatctggttcaccagttcctaatacgccccagatatattgctcgatcatctggtgtaaacgatataagttactttcaatttcctgccacggaataccggactgatggaaacgaatgttggtctgaataacgaagttgcgaatatcatcgttttcgttcttcttaatacccttcacataagcaattggtactcgtagttcagataagatacgttctgcttttggttttgcttcaatcagcatatctcgcatggattctctaacattacctcgactcttgtctagtaagtaagagcgagcatgtaatcccatttcttccattttgtcgaatactgcatcgaggctaaacgttttaaagctaaattctggatgccagcagtataactcatgtaaccaataaacctcaccagcaacgaataatggatttacacgatattcgaagtcaccacggaaggacatggaaccttcacgaaatacttgacgatcatggacgatgttcttttctacatcttcagttacttttaccagaatctcgtctgatttacgttcccaaacgcgatcgggatcaaataaactgttctgtaaatcataaacatcattgaactttgaaatgattctcataaattatccttttgcctcaatctataaacatattatacaagactttggggcatctgtgcaactgaaattttattacaaaaatagcccagtcgcaaaagtgcaggctgggctttgtcattatttattttgctagtaagttgatttgagatcaatcttctttagtactcaattctctagcacgacgtagcgatccagcggttctccatagtttgatgtcggcaactgtttctttatacggagcgactgtagtaccaatcggcccaaggaatagtagaccaaagaagccaataaagcgcatgtatcgtaaacattgcttcggggtcatttccataacagcttttcgttcatcttcactagaaaaagattcagctttatcttctagtcgtaggtattttacaaaccactcagcggagtattcatccagatgacgaattaatgcaattgcataaccagctccgatcaatagccatgcaacaaaaataattaaaagaaaagtcatgttagctcctaagttagaattgaggtcagcgaccaactcaccacttttgcctgtcggggggcacgactcccctccgtaacgttagtaggtgacactaactcggtcctacgcgagttctttacttcccaaagtattcggctttgagctgtttcattttgcgagttttacggtagaatccataaagagctacaggcccaaatagtgtatcgaatataataaatattgctagtattgctttatatgttttatctcttcctagctgatttagtatatctggagaagttcgtttcatatgttctagcaatacgtctttatttttagcaacaaatacatcatcaataaagctataaattgcaataactgcaccaataataaaccaaagagcaaacggagaaacaatcatttaatatccttttcgtcaaagtaaatttcagtgaaatatggaacttgtcccattatcattgtgtcaccgaatttttgcattagatcccaaagaggcatcttgataaatccatcagtaattactggatcagtgtattctgcaatacgtttatctgcgaaaacaatagcagcgtctgaattatgctcataagtataagctctccagaattcagtatgctctctacgaagatactccagaactggttccgttgctggaatcctcgcataactgtttaagtttatttctttcacgttcttctctcctgcgtttacgttcggccatcatgtgtgctgctacaacttcatgatagtggtcattaatattgtcttttggtaagaaatgcttaatagtttctatttgacatacaactcggtaaagatgtttgtttggtatagttaacttcataccagtaatgaatccagaaaatcctggtacactacacatcggctcaccagttacagaaccatcaggttgaagtataacctcaatcgagatccctagcttcatactataaagctgacagccttcccctttaccaaatctagcccagactacgaaatcttcatcaatctgatcttggatttcatccacagcagcctgaactctaggatctaaattactcatcttcaccttcaaagtcgcagttataacgacaagtaaacgaatcggaattgttagaacgttgagtagtgatttcaccacgtttgctaacagtaacagcaggagtagagaagtttttattagtatagatttctactttaccattatgttctttaacatcacgtactttaccatactcggtaataatgccattctgttgaactttaacattaccatttttcatagaaactttggtagacgccagggaacagaaactaactgcggaaaccatcagtgcaataataaacttattcatcagggtcttcctcattacagtcacggcatacatcataatcgttgtaagaatgttcgtgtgcttcacaccaccagccacactcatcacacaggaagatctcagtcttttcaatggcttggcctagtaattcgtcagcttcgtcatgtgtgatcttcaggctacaaacatcagcaacacgttgaacaatcagactccctactttgtggtaggacatgcaggttccttgtgcatcatgctcaaggacatggacagcgcagtctaagcgatttttcatttcaaagccctctctatcaatttatgtaactattataacaaataaagagggttttagcaaatgaattatttacgaaattagtcgtagatccaccaaatgcctttcttacgaaggtcgtgatctcgattgtagtcgtaattttctggatctttcattacacgatgtaactcacggcgatttccttgtcgaaccattttgttagagtgccatttaacattctgattgatagaatcccaccaatgaccatctttcttttcgttattcaggatgccttcctgaatctctgcatctacttcatcccaagacatagcccatgcttcattagagcgaactcggtagtatttccactgtttaccatcacgatcagtgtaaacatatggaatacgcacgttggtgctatgaaagttgtaagtacaacggtgtttgtcacgccagtaacgatttccagattgtttgcgataagtacggctcatattttctccattaagtctgtgaattaacttaatgtgggcgaacttcgaaatataacatcagtaatctccgttatcgttgtatactaccccagcgctaggaagttcttctactgtcacatcttcaaactctatagaagatctatggtttctagccagttcgattgcttcttcctcagtttccgcaacaacaatagccgtaccacctaaccatagtccacggtagttcactttaaaaattttcattttgaaaatcctgtgtatataagaaaaccccaactacctattcaatagccggggtttattatttaattaaagatcaggacgctcatcctctactgcaataccttcgccccaccctacaaaaccatcaaattcgtcttgcatttgtctaagctccgaaattttcattcctgacttactattaccatagtatttatggggattaccacacatccaacaagaacaaatacaaggtgtagtagtaataatacctaaccgtttaggactttcttcatgagggaagactgtccagtacttcttgcgattgttctttacacgttgacgatgatgacgtcttaatgctctgtccactaagttctcctaaaacttcggagataaatggagtttgctcgactaccttgcgtagttgggagaaatcgtatccaaaccccattagatcgcctgagtaaatgtacgactaataacgtcgttctgttgttcacgcgtcagtgcattaaatcgaacagcatagccagagacacgaatggtcaactgagggtatttttcaggatgtttctgtgcatccaaaagctgatcacgacttaatacattgacatttaggtgctgaccgccttcgatttgaggaactacttcaacatctacgatgcggaaggcttcaggatcaaagtgaggtgtgataccttctagatcttcaactagaactttctgtttaagttcactgtctttagagtatagctgaatgatctgattatcatgaacaagattaattacgccggatttaagattttgatatgctttcattagatctccctgatgttagaaattggctcagctttttgataacccagaagcaagataaaaactgggaggcaggcttgcttttctcttaatcactagctactgttggagtgctagcattccggtgagattgatggtctcgattaagaagaaaagcacaggagctttgattttaacgttgcggtcctcctggtctgttgcaactacgtgatcgctcacgctaagacaatggctatctaaagtcttagcttctacatttatactcttggatagcatagagttgcggtctacttcccgccgtcacgcccggccatttatagaatgtggactctcttctcagcaagttctggcactgcggcctgatcttctgtttggtagttagtagtggaatcgaaccactctagtcgctccgtatgaaggaggtgcataaccgatctgccaactaactattatgtggtactccgacttgggatcgaaccaagatttgacgattatcggtcgcctgttctaacctgttgaactatcagagcattttgttacatcatctcgtccagataagaagtatactggtatttagcttctccagttttatctacctcaacttctgtccgtggtacttttcgcactaaaccatgaatcatcttataattaatagatttagatggttcgtgatcttttggaaacacctgcttaaccgtaaccactttaaagccttcacgtggtgtcaacacaacaacttgatcaccttctttaattttccaagactcaggaaattcataggtataacgctgaccaccagtttgaaatactacagaaagataacgtttcatttggtttccctctcattaatttatataaatattataacaagaaataggagagaaggcaaatgaatttttaaatttggtgctcccaccaggaatcgaacccggttcagatgcttacaaggcaactgcatcgccagcaatgctttaggagcaataaacccgtcatttcaacgggatttctttttcgtacacaggagacttatcagacattactgtcattgccaactgctgtagaaattcgaaggttaattttaaacgttcttcgcctaattctacctcaacgtatttcttttgtttatcaacttttaactttaggttatcagccattatgtagtacagtactggaggtagctaatgttggactacataaaagctgtgctttccagtctaggttaaactgttcacggaactcttcatacgtttcttcaggatgaaagctataaccttgcttttcatcatttaataaaaccgaaccatcttcttgctcataggctcgatatgtttcaccaataatcaaaacgcgtctattaggatttttattacgaaactcaaaaacgtgcataacgtttccttatttggtgcgggatacgagagtcgaactcgtgtctactggttggaagccagttattctagccactgaactaatcacgcatttgtttggcaggagaaggaggaattgaacctaccactagtggagtcaaaggccactgtgcgaaccactacactattctccaattgtttggctgggatgccacggatcgaacgtggaaccttcggagtcagaggccgacgatctgccaattgatctacatcccaataattcttactctacaggaaccgttgcgattggctcaggtccttcaagacgttttccttcatgatcgacccggataataccacaaccttcacagattacgacagcaccataaccttctttaacttcggcttctgtaatcagaccagataagtcaccagtatctttgccccacatatcaatggaacactctttgcagaaatcagccattattaacccctaggacaagttgtagaaacgatagtgcgttcagaaatccaaccaccagtataatcaccgttaactttatagtcaaccagggtaccatgaccgcgttttgcagtaacaggtagaattttagtgccaccataaccatctttgacagttacagtacaatctagtgatgggccgatagtacatccagttaaagccagagcagcaatcaatactaagtatttcatgttgttatccttgttaagttaattggtgcatcctcagggaatcgaaccccgatcgtaaagttcgtagctttacattctttccgttgaaataaggacgcaatatttggggtggctagtggaattcgaatccacataggcctgattcacaatcaggatcattaaccatttatgatatagccacaattaaagtatctactgctaaagactttaattgtggcggctctccgaaactcatcacactaacaactagttgattacttctggattctcgcccagaaaattctctagaaaggtgcgccgttactctttgagccattgatgtatcaaggaacagaaggacttgaaccttcacgagatagaccatttatctcagcctcgttttcgggtatcttatgaggagtggatgttcctcttacgccctttgggaagccccgtctaccgattccggcatactccaagaattatttaaaacttatagccttcaggaaccttatctttaacaccatcatacttagcttgaatgtagtagtctggtacatgatcttttggcagattcttgttagtatcatgaaccgcagctctagcctcttcttcagaatcaaacccgcgataccagatttcaccaccccagccacgttcactttcggtatacttaacaatatgtttcataaggttttccttattagttggcggaagcacatggagtcgaaccatcaccatatcactacagcgggctagttttcaagactagttgcataccactacgcccgtacttccaattgtttggcggaagaagagagattcgaactctcaagcctgctttcacaagtcagccactttccaagcggttttcgtcacctaatcgatttgctcttccattttatttaagatgatgcctctactacgccaggcagttagccccgctgggattcgaacccattaaaacagtgtttccaacagcagtaggtttctctgaacatcaaatttggtagggatggagggagtcgaacccacacccgaagactagaacctaaatctagcgcgtctgccaatttcgccacatccccatttgtttggtggagtcactcagaattgaactgagttccactgcttgcaaggcagtaagtttaaccaaataacctatgaccccaaatttggtggagaataacggaatcgaaccgttctgttgtcctcggtgcaagcgaggtgtccactccatgcagacccattccccaaattctttaagtttactaaggctattagctcggtgtgcgtactgctctcagacattagccagtagagaacagccgctcttcacaaacccgatacactattcagttgccgctgaatctagtggactaatctagaacttcttgcaaattatccccccgccattagaggtatagttgcaagtgtgctttctggcagccagtcctaggtcgagccaataccttagtgaactttgatgaggatttctcctcatcaatttatataaatattataacaagaaattaagcactttgcaattgagtttttgcaatttcttggatatgccttacatctttaacgaatagcatatcagaacttcctgagtgcatactctgcatgaaaactccatcatctggtgcatcttctttcagggtgattccattccaaaactcggcaaaaccaggtgttacgacacctcgacttgcctcaaatatatcaccttctgtgatggtttgtccagtgttcagagaagcataaggctgttctaaatctacatccttatagaactcttccagaccttgttccatatcccagcccttcatgagggcatactgcatagttacatggctgaagaacgcttgaacgttaatggaaagtttcattgtaattccttgttaagtaaggtggtactcggtgatagaatcgaactatcgcaaccgccgtgtaaagacggggttctcccattaaactaaccgagtaaaagacttccgattaagaacgcttcaaataggaactcacaaagtcctgctaagaacattccaatagtaaagtcagcagaaaacacgttgtactgcttgactttttgtttcattaagtaaaaccagattatcatctaattttcctttaagttggtagaccgcctgggacttgaacccagaaccttccgattaaaagtcggatgctgctaaaccaattgagctagcgatctatttaatatggataaacttctttaatagagtaaacttctaagtagcgatgattaataccaaattcagccattacttcattttcatctttaccgtaatgagctaaagtatactttgaacgatctttgctagaacgtcgatcacttactactaatcgaaatagtttcatttcgtatcctctattaaactggaagcgggtgtaggaatcgaacctacctctttctagcttatgagactagcgatctctaccagagatctaacccgcgattgtttggtctccgtgggaggatttgaacccccgaccctatcgccccaaacgaaacgctctggccaaactgagctacacggagaatattctttgttaactcactttataaaatatattatacagtgaattgagctaaatagcaactacatttttaataaatttacttattaggtaagtcaccgagctatcaactcatgctagcgagaaagtttgcgagactttctttaaatactagaacacacccgccgatgtgtcggacttacttaataagtaaactttagatctttcgggaaattgccaccctaagacgatgccaccactagagccgttataggcaatctatctctagctgtctgccccaatgctatcggtctacccgtaggtacgttttaaccggagggctttagcgaatcaaacggccggaaatcatcgccttgtttcttcacatagctgtggaatttcaccacaatctaaggaatttggtgtggagagacaggagtcgaacctgctatgttcacaatgacgggtggtgtacaagctccggagttacccaccttccgatccacatcgaaccctcaacttctggttggcaaccaaaaattataccttttaactacgaacgcataataagtcaatctaggtagggcttgaacctactatcacttgtgcggatttacgagaaccattctttcactcgaatcgaacgagcttctaccctcggcaagctggtgtcccctctccaccacgctagaatgtttaattgggttaccacattccgaatcgaacggaacttaagcctcctatcttgatagatcctttggagggttctatctacggcaagggcattacttggtacacccactaggacttgaacctagaaccctccgcttaagaggcggtagctctaaccaattgagctatggatgtataatttggcgcgaccgatgggattcgaacccacattccctcccgtgacaggggagtaccattaccaagccagccccgatcgcataatttgtttactcacctttgagtttagatatagcttcctcaacttcttttaaagcctcacgatgacggttgaggttgtgaagttcatctagaaggtcagccttctggctctctaccaaccgttcacgaaccttaatattattcttaatattatcacgatcagcttctagtcgagcaattgcatgagttgtcatatctatttcctcagttttagtgaaaatggagcctgttttcgggaatcgaacccctcatctactaaagatttgcaactctctagcaaacgtcctctattaagctaaccatagcatggttactcgggtaattactccctttcttccatagagacttcaggcagaatatggcgggccgtgtaggattcgaacctacgttgtctttcgacatggattaacagtccaccgccaaaccgcttggctaacgacccataaatttggacgaccgcatgagattcgaactcacataaggaggttttgcaggcctccgcctaagccattcagccaacggtcgtattaatctgtttcacgcatatcatcgtgtccgcaagtaggacattcccaatggcattcgtcatgttccccacactgagaacactcgtacatttgtggctctttaacatcttctagattgacgaactctagatcatcaaagttgccgagggttcgagcatagaagccgtcacctgcatcataacctgatttaccacaatcacacattttaaattcacgtaaacgtgtaaagatatgttcagagccacaacacttaaatttaactaactttttcatttgcttctccagttcaatttatgtaataattatacagaactttaaggatttaagcaactacatttttcagaaatttgatgcctttcttacgcttcttataccaccacgttttagagttttgtcggttatgaacgcttgagatctttgcctcattaaagtgcttcaaaaccatataatcagctcctagttgctcaagtggaatgtactccccactagaatcataaacataaggctgttgactagctctatagtgatatactttattaatccggcgtttaagcaaaggactagtacagtatataaagaagttttcaggatgcatcagcatctccttcaaattggtgcaccctgttcgtatcgaacgaacctctcaagctcttcaggcaagcgctaatccatctcagctaaaggtgcaaatattggcaaacctactaggactcgaacctagaccgtacggttttggagaccgacatgctgtccagtaacactctaggaatgcagaatttagtaattttctagtttggcttctagctctatgactagtttatcagcttgttctagttgagcttctactgtaccaagctctgtaacggctttattggcaagagcataaagttcaccaacatagctttcgttccacgcgtaatcaggaatactatcatgaagacggcggagtagttctcttaattgaacagagccttgcataagaatctcctaagtaattggcgtcctgtgcggggatcgaacccgcaaaccctaccttgaaagggtagtgactttaccagtttgtctaacaggacattaaatttggtgtgggaagatggagtcgaaccacccgagacccttccgagtcggcagatttacagtctgcttcgctacctctacgatactattcccacatatttggatgaaaagtaagtcggttaaactcaaggtggaatatttcaggctatcctgactttacccctcaaagcaactcgcttagttacttctcattcagatatgttttccaaattagataactattatatcaagatttatggcactgagcaagtcaaattttaaagaacttgctcagtgctgtatcagttaatcgaagtcgggagtgactttcaaggtgaacggaagttcgaagacttcttcaccttcatcactaacggtaattacacgaccttctagtcgaaccatagtgatttcgatatccgctttagcatctggagccataccagcttcaatacatttagctttgatttcaggcagaagttctacattgtagaaatagagccactcaatctcaccttcccagccaccccaggatttacatactgagctttcgataccagttgcgctaacacgttttgacattctgtttcctctcatcaacttatataactattatagcagaaatcttaagtaaaaagcaagtacatttttaaaatttctgcttggaggagttaaactccggcttcttctgccagatcaagtccagctaacgtgagtgctagcgttgcagcagcatactcttccgcaccggtttctttagcttgggtgagaatagctgtaaactgtgcctgaaaatctgcaacagcttcggtaagacctgcttcagctactacacctttaatcagcaaacgctgtgtggttacttctggattagccatgttttttctccattttcatttttaatagtttgcaaatgaagtcaatatcttcatctgtgtgtaattctttatcctcaagagtagccttgaagttcttcgccagctccatcaaaagggtttctcttgatcttcgggctggtggaggcggtctctgatacatatcagtttcctttatttggtaggggtggtgggattcgaacccacaaaacccgaattttaagtccggtacctatgccaattcgattacacccccatgtaatctttagagttcataaccctgaatatatcgagcaaagccagtaatttcaaactgaattgcccaggctacttccatatgctcaatcttgtcgaaccgagcatcagactgctctaggaaatagcgagaaataatagggaactcaatatcgaagtcctctttatccattccgtaatagaagttttcagagatattacgaacttcacggaagaagtcctcaatctgaaaatccatcagaggatacgtgtattcctctttgctatcatccgtttggaagaagcggaaatgtacgagacaagaaccaataaggttaactgccggagtagtataaatgtccatcttagcctcgctcaatatctagagaaataccacatttagggtcaataccagagccattacagtgcgtacacacataagtgttaaaccaagtatctcctggttccgcatcattccattcacctgccccgaaacacttaggacaagcacattcttctagctcttgcttgagttcttggaacttagacatatcgtctcctagttaattggtggctcctctcgggtatgatccgagaacctgtcccttatgaggggaatgctctaacctgattgagctaaggaaccatgaatttggaggaagataccagactcgaactggtacaccgtgtctccacagctactggttgtttagcaaacaactcccttacctttagggttaatcttccgaatttatgaatatattatacagaaaatttcggcaattagcaagtgaaattttctgtataatagccctcgcttagagggctataactactttacttgttaactcgtacaaagtatcctttataggctcccatgatagagttacccaggaatactagccacattgctaggattgcataagatgcacccgtagattgggcagttacaagccaaatgtatacagtaccaatattaatggcgatccagatcagccactgttcagcgtactgcttaaccataagccacatagcaactacactaccaaccgcagtaaatgcgtccagcattgggaatggatcagcggtagtagccaggaaactaccgtaacctaatgtacctactgctaaaatccctagagtcagcagagcttgtgctttagtcagaaccttagtcggaacatctggcagattacttggtttattcttatgccagaggtacattccataaaactgcataggaacgtaatacatcaggtttagtgctgcgttaccataaagatctgcatttaaagctgtaataccataggtcagaacacccaccaatccccaaacatagttagaaacgcgcccctttgcaaccagaatcacacaaacaacgttggtgattgccgtagcccaatctaacgctgtaccattatagttagccaaactaatgaaggctactgcaatgaacagccacagatattccagaggtttccagtttttgaagtcatttacaagatagttagtcatattagatagctcccgcgtcaacatgatgaattagccagtctacagcatttacagcttcgtccatacgaactttgtagtctggtgagtcaatataaacagtacgtccctctgggaattggttagggaactcctccttcatctgctcaaatagttctgaagtaatagaacgatcagagttaatacgtaaaccatcatctacccacttcacagtaggcgctagaacaataactaaatcgtagtgttcttctttcgcaatagccgtaaccacaggattcttacgatgttcgtaaagtctatggtagaactcagtaatgaaagcattggtgtctacaaacatgatcttatttgcagtgcgctctgcttcaaactctagctctttgtgcctgaatgctatctttgtgtaatcgtcactagtcaacagactttcgttgccgactagatcaacttcacaatatgtacgaccatattcctcgacccatgaagtattatataacttcgcaagatactttgttaaagttgtcttgccggagctttccgtaccaataacaactaccttacgcacgtagtctttacgaaccacgctaggtagaaactcccaatacttcatcagattctcacgaatcatggtagcagagattggtacacgagtacgttcagagtctaccacatagtgctgcatgtgcggtaaatactttttatattcttcctcataccctagctcgctagagaagatggtgtagttgcgatccatgatatcttctgtattatagaagccccactctcgcatactttggtcgattaactcacaataccctttccaaccgttcgggtactcaggaacatcatcttcaactacgcttttaatgataacatgatcaatatccgcataggtttgctcaagccaacgtactcgattcttcaactgcaatacttcttgatcacgtgggttttgtcgatccagccagcgattatcatggcttacgataacaataacacgttcacacatagttgcagcaacgttaataaggttgatatgaccacgagttaatggcgcgaatttaccaattactagaccagtcttaatcatatttgcttcctctctcaaatttataaatatattatacagagaatttggcattcaagcaattgaattttcaaactttttgcaggaaaatagtagggcacttggggtagcaggtaagtgggtagaccccaaaattgttaccccaacagaaatccgggggcaatttttaaagaccccttgacatttttgttggggtagtgtaaagtatatgttatggatgagtgatcaaagagacacacattttctatatactaggaggtgtcaaaaaatgacagaagaagcaactaagaaacctgagaccgttagtgaagtcgcagcagaactgagacgtcatgaggaatcagacaaacataagtgggagaaggtcaaagcctacgaaaagaaacatcgtgatcatgaagattatgatgaagatgatgatgaagatgacgaccatgagggctgtcataaacataggaaacataaaatgcaagaaccagtaaacgtattcactagcggcttcccaggtctgatgggtggttacccagcagtagcaaatggcgctttcggcggtgaaggtatgggcctattcggagctatcctgatcggtgctctattaacaggcggattcggtggtttcggtggtttcggacgtggtgctggtgttgccgctgagggaactgctgtggacgctatcctatctaaccaggatactgcaagtattctagctgcaatcaacactgctcgtactgaagcaaatcagggtactggtgctgttctgagcgctgttaatggtgtaggtgctgctcaagcttctagcactcaacagattctaactactgtgtatggtactggtgctaacctgtccaaccagatctgtcaggaaactcgtaacgttattcagggtcagttcgatctttctcgccagatggatcaagctttcgctgctaaccagatcgctcgtgcacaggacaagtttgactctgctcagatcgctttccagcagtctcttcagaccaacaaccagttcgccgctgttcaggctcagatgtgtgctaaccagaacgctctggaacgtcagattgctgagtgctgctgtgaacttcagactgcgatcgctggtgtaactactgcgcgtatccaggacgaactgaacgaatgccgtctacgtgaagcaatcgctgcaggtagcggtgcaaacggtcaggtaatcaaccagatcgctgtaagcctgggtgcaattactcagactctagcagctctacaggctaaagtaccagcctaatctttaaggggaggagcccattatgagtaaatatggttttgtgaacaacggatttaatcaaccaatgggctcccagcagcccattccgggtctggataacccttatctacaacagttgcaacagcgtttagcagaagcgcaacagatgcagcaacaactccagcaaaaccctggaagtgtgagccctatgcaaatgatgcagcaaatgagcgggcagtcgcaaatgcctcaacaaatgcagcaacaggtgcctcagcagcaagttcagcaacaaacccaacaaccgcaggtttctgcggaaggacaggcagtactagccctttttgaagacttcgcaaagacagaggacgggaaacagcttgtatcacttatgggtaagtttaatagcttctgccaaagccaagttgcaaaagctcaaaatgggggtaataactcctaaggagaaattatgtgttgcagaaaatctgtttcgtgctgcccaatgcctgtagcacgttgttgctctccagcaatgtttacacaaataccggtgttcaatccgtttgcctttaagcctactcttatcctgccccctagagtagattttcagtcaagattggtctcccgtatgggtggttgctgtaccccgagagtatggttctaaggaaccaagtaataaaaaaaaaaaaaagcccctagtcgaaagacttaggggcttttctttttccttaaatacagaaaagcccgcgctctcggaggaaacgcgggcttacatcaagtgttacgtgtggctattacttattacgcatgtccatgatcatctgaccatcgtaaccagtaccgacaacagtctgaggaacaccaccttggtatttttcagcacgaagcatttcaacttccagctgtttccaacgaatcatctcaggagtaatggtacgttgcagagcggcgttagcttcagcttctttcttagctgcgtacagtttagcgtctgcatcacgttcgttagcaattgcttggttgttacgagcttcacgatcggcttctgcttgtttaactttctgctgagcttcttgttctacacgagccagttcagctttagcagcgttaacttgttcttcacgaactttggtattctgtacctgttccatgattactggtggcagagtaatgtcctgaaggaatacttgttttacagtgtaaccataaggacgtgcatattcttcaacttcttgctggatagcggtttgcagttgagcctgaatcttagcatcaaacagatcttgtgcttttggcacagacttaccaaattcacgaatagtagacagcatcttctcttcaacgtatttgttcagagcttgatcctgagtacctgcgttaacacggttaatcggagccttagaaccatcaaactgcaacataacagtaatgtcaacagtggatttaaacttatcctggctaggaacttgcagtttatccagtttcatggaaatatctttcgtactaaaagtatcaaaagaagcaaaggggttaacaatgtggaagcctggaagtacagggttcgggttaactttacctaagaaggtctgagtcttaacagtaccatcctgaactacggtgtacgagttaagagctagaaccagagcagctacaccagctacagcaccgataccccaacgtttgatagagcggattactttctgttcagaagtcagttctttagtgtttttagtaaacatatatttccttgttaattacagttaataaaattggccgaggtgacaggattcgaacctgcataaaggaatttagaagactcctgcctatcccttagactacaccccgaagaatgattacttgatgattttgtttaacttggtttggctttctacagcagctttagcagatttctccgcacgtctagcggctattcgagctttagagtctacgagcagttcttcatacttcgtgtttacaaactcacgaatctctttgtagaaacgttgctcactcatgtactggttagcatctgcatcataacagcgcaaatagaagtaatcactaggctgtcctttcaaagtacgttctaggatttggggacgataacgattaagtacgtctttcgcctttttaacttcatccgtctcttcgcctagttgtgttagatgatacaaacgagtattatcaatataatctagagcaacactaaagtactctccagtacgaagatcgtaaccagtaatttcactcattttctcttgagcttcttctagggttaaacgctcggagaagtgtacaacatgaagaatatgagggcaacacatttcttggtgatcaaagacacaagttgttccaagattcataagttattccttttgttaggtatctttaaaagctctcgcaagaactcttaaagatacccggcggtaggtagggtcagccccctcagattaagctcttcagccctgccgtcagacaatatcttccagtttaagtcaaggtgacttcgtggttatgtactccgtatgtggaatactcggttagacttaggtcatgactcccagtctactgctgctcctcaacaggaattatcgcgaattacctgtactattgcgcaccattagtgacatctctcatgtcagcgtttcccactctcatagttacgcggtctggtaaaatcgcacctccgattttcgatgcgaagttagctgaggcatatatcaggtaggggtagctcagcaagcatcccagtcctttgtggtttagctatttcgacctaacctgctacttgcggtagtgcgaagcctgtccgcctgtcatagtatgtactctagcagcgagtgcttatccggtataagcccgagttatccgattctttccgaccgtaggattcgaacctacatcttccaccagttacggtttgatattaccatttatactaggacggcagtgttatcacataagtcagtttcggcaccccacatatactaactatctctagcaaactcaccgtggagttctttgcgcagagtaattaagtattcattagcatcctctggtgttttaaagccagatttagcgtatttctttcctttacaatagatttgtgctctccagttactcccgtgtttatatacacctttataaccagaagtattatcttcccttaatcctacattgctattgttctcacaataattagctggtctaaggttatcaatcttattgttcagcttgttggtatctttgtgttctactatctcaggctgatagccatagtgtaagataaagcacaatatatgaactaaatacctttcaccattgaatctagtagttagataccctcctactaaggttttacattccctttcagagttaactagttttctatataatattccacttaaaggatcatacctaaaagttttggaaagtacatctcttgtaggataatcttttcttttcatgaatctattatatcaacttttgaagtatttagcaaatcaatttttaattaaattcgccagcaatctgagcagccattcgaccgtcgtaacggcccgggaactcttctttgattgccttcatcagggttcctttattaataccagggttgagtttaacgagttccgcaaagtatttacgaatctcagtctcagtgagctggctaggctggtattcctgtagcatagaatacaggagttgttcgtagtctacatcagtaggaaccttagtcccaacgtcgattgcacgctgttttgcagtttctaaagccttaacttgagctttaagatatgctacaaactgctcacgagtcacaacgtctttatcaatacgctgcaaatcaccaatcatagtctggagattgagtgctcgttctttttcaccgtggatacgtgctacactaagcagaccacgcagcgtcattagaatattttcgcccattatttcgtttccattgcttgattaaaagatttttcagtcataaccgcagagactttagcgaagtcaaacttactagggtttgatgtaatatcagaaatcttagcagttttaactgttttagtagtacgaataccacgggtattaacaccaataattacaatagatttcatctttcgctttcctctcattaaattatgaaagtattatatagaaatttaaggttttaagcaatcgaatttttaagtttttgagacaggaggtttgtagaacgtgtgtccctgaatcttcgttgttttcttaaatttctttgtccagtacggtttatctttgccactatggaagtataatgctccatacgttggatcatgtggtaaatcaacgtagtatatcactctagctaaattcttagcaacttgccaagcctcatcggttttatcaacttttggtctcttagatacccaagagaactggttagactgatatactactttacagtaggaatcagggaatttaccggagttcacacggtttttagtaacctgtgcgactgcgatcataccctttgtgccctcacctcgtgcttcgaagtagatattttttgcaatgcaatcaatctgctttgagtcgtaggtagcatgactattgaagctaaaggctagggcagcagttagtagcaaagctgccttcatcttttatttactccacccaatcgtattcaatacggtttgggttctcttgatacccgttgtctaagagatcattacgcatgttctctttgcctacagggtttgaggttactaacaccactttcttgggtctctgaccaaattctaagagtaaacgaagaatttgataaccttccataccgtctacagccagatcgttatccatataaacgaaatgaccagtggtatcggttgtattcagaaactcaacagcggcttcgggggttcgaatgataatatccattccattcaggttacgaacatcatcaatcagaatatggaaaatcataatagcctcgtctcatcaatttaaaaatatattatacagaagttatagcgttttcgcaaatacatttttagattgagagactagcaaaccgataaacagcctagaggcgccacaggccatatcttatgagccatgtacctttgacctagggtttgaatcatcaacgaatactttgcatcttttagctttagaagtttagaagtttgagtgcttttaacttttcagctttcatacttgagcgttgatctttgaagttgtgttggtactaccaacgacctttgtttttacgtgtcagattaagagtctgatgtaataaacataatctccaatagattatactttatagtatggtcagcggtcttatttaacctcgtatttcaaccgctgctgcgaggtaagatgcttgggctttcgtctaccgatttgctagccttttaattcattactctacttcgataaaagtagaggcgttggactcagacagaacaaagtcaacgttagttgcaaagtcctggtagtcttcgtcatgctgcttgatcaacgcttccagacccagaggatcgatcaggaatggagtgtgcttcagttccagcaggttgatctgcattttgatttcatcttcggaagtcttcttgtcacgggtggacatgttatcctgaagacgctcgtacttagcatcaaattgagctttctgagtattgaacttaacagttgcagcgtggaactgcttacgcatgttagccaatagctgtgccttgagttccatagaacgcttggcttcgatagcttccgctacggtcattttatgagaaccgatttcaacaatcgtttctgcgttgctttggatcagggcagctttgatgcgatcgcgctgagacatcatatccagcagagactggaagtcattcgcaatacgagtagacagagcctctacttcaattgcagcaccaacaacaacttggttgtggtctttaccttcgccaaccgcaaccagaagctgttgttcagtggctttacggattttagcttccagagacttaatggttgccagagcacgagttttagacatacgagtagtcattatttcttccttatatgaagtttgagatttgaatttgttttcaaagcggtctattacagaccgattgccagcagagtgcgcagaacagtatcagaactgttatcaattttcggattagcgcggttcagcacgttaaagattttctggataccagactgacgttcagccatacgacgcagacccagattacgaatagctttcttaccatttttacgagtgtttttagatactggcattgtattttccttttgtttgttttctcaaatttatgaatatattatacagaattttggagctgaaagcaaatcaaattttgattttttcgatcatgcgtgcaacgcagtaactttcaactaacgcatcgaatgctgggtcatgtttaactggatagattccataacgaatggtgtccatcttttccattttagctttagcccagctagcaccttcggcctccagttctttgtagttatggcctgcttgcatccacagattacggaaagaacgaacgttacctagattccagaatttccacggaacgactgcttcattagttccggcgtggaacgtattagcagagtagatagtcatatcaaactctgggccattgccgtaatatagagcattttcgtctaggaacaattccatcatgttcttagtcatgaaataagcattgtaattagaacctagttcattagtgcaatgatgtttaccctcacggaatgcaatgagttttgacttacgattagttaatgcctctacaatatgacatgctgaagtactgagtctggcttgttccatccagaaagccaaggtagatgcagtaactttagcacctgagttaagttggtcttgaacatctagagttacgaagaccagatcagggtctttgtcaatcccgtgcatggctacgaaagcgaatgacggcattgcaatatgggttgttccacagttatctggagttcctagggattcaatgtccagcataccaaatggttttactttcataacttatcctttattgtgtagaaaactaacaaagagtggtctctttgttagactcccactgcttggggtctttcaagggaatttcttcctcttcaaacaggtctgtcccattttcattaacatcccagttttcttccataatttcttctaaaagctcatgtttagaaagacgagtataatctctcgcagacttgtgagtgctagcacggttaaaatcattctttgcaacgaagttacgcatagtttctccaaatgagaggggctttcgccccctagtatatcagagataagtcctacagtagtgctctagggcagcctgagcttctccaggagttacaaagtaaccttcactaaactgttgggcttcatcttcatattcataccaagtaaaggtacggttgtttatggcctcggaatcgtctgataacctgaactctagtttccagatattggtgaattctgtccgataagcccttaccgctccatcgttgaacaatcgttggagcatcccagacataatacgtgagttattatctctcatattacttgcccagcagtttaaggatattttccttaatagtttgagcagatttttcgctcttattggtttcagccaatttcagagcaagttcttcctgctgtttctggatatcagcagcggttttctgatcagcatcaatacgagcttgaagttcatcagtgatcgtggtaaaggaagcaacgatttcagtaacggaacgtggtttcttagagaacataaaatatccttagttagaaagagagttagtatatggggctttcgccccatcaatcattacttcgctttacgcttacgagccggtttagcggatttacgatcagaagcaccagtgaacttgatgccaatgccgtagcacagagcgcgaacgttgtcacggctatactctacaccgaagatattcggtttaaccgaaccgaactgaccacgggattcacgcattacatcagccattggcttacgcttctggttgactgccttttcatactccttcggagacatatctttgcgagcaaagagttcagcgccaccgttgaagctcagagttactggtacagacttgtgaccttcgcccggaacgaatacaacatgcttagcagttgcgcgagtggagttcttagccttcggcttgtgacgaactgtcagtggagctgtcagagcagcttgagcctgcgtatcagttggatgcttacgcagatgacgttccagacgagctttacgattagcttcggtctgcgggaaagtcttaactgctggagctgcctgagtttttgcgtttttctgcttagccattatttgttttcctttttgttgatcaatttatgaaatatattatacgagattttgaagcgtttagcaaatgaattttttaaaaattacttgccgatcatcttagcttgttcttcatcagaaacgtactgatatgcgcctttgttatacgccggagcagtacacatcttcttacgctcaatttcttcttgagctttacgttcacgttctgccagttcctcgtctagataaactaaacgttgttcaggaggtggcggaagacgcgtttctggttctccgatattagcctttcttatctgacgcggagattgtgcacgttttctcaagggtttaaaacctaatgaatttgagttataaattcgcataaagccctcctcactttcaatacgaatattatactaaaatcgagggctttaagcaattgaatttttaaattattaaccaaacttctcttcaaattcctgttcggcaataactgtattgcagagagcatctactgcttcgttaccactaataccagaatgtcctttaaccttaacaaatgttggattagtattatggtatttaatgtataattgagtaagttcgaaggcttctttccaaagatctaggttgagaggagtctctccatcacctttcttccagcctttcttctgccaagaccacatccaactttccataccattcttacagtatgtagaatccgtatagataataactggacggctatctttcttagtagaccaacgaaggacttcaacgattgctgtgagttccatttcgttattagtggttttcttgctaaaaccagatttagagcctaaacggtcatcattatcattaaaaacaatgaaaccccaagcgcctaaaccaggattgcctttacatgcaccatctgtatatacgtggaaaaccgacattatttactccaatcaatttcaagccaaaaaccttcgcgctgctcatacttagcgtctactacatagcctagtttagtgagtcgttgcataacgctgtttctggcgttttctgagtattcagttaatccctgaatatggcaattaaattctttttctttgattgctttgtcaatctctacagcaataagagattctagattaatcacttcctgtttaataacagcaatagtgttttgctttgcttctaaagcagataaaagaatagacattatttttcgccttctgtgataaccctagtcgccggaggaattggcggcataggagggatacgtgggtgacctctctgtgcttcatttggtgctttaggcggttcaggtctaattgcctttaattccttatctagaaattgttctatcgcccgttctacaaaatgatcgaaaggtaaatgataatactgagacagagctaagaacctacgttcttgactgtgtgttaaataaactttctttttaaagagtcccatagttgtctccgatttataaaatatattatatttgaatttcactcaataggcaaatgaaatttaaatataatagccccgaagggctatttaagttagactgtgaatgggtaagcaatagctggatgatgttgatagtctacaacatcgaaatcatctttatttacccaggtcagcacgtcatccagagttttaatgtctggattaataatcagatgaggtggttcaaaaggttcacgatcgaactgtttgtgttctattagaacttcatactgattctcatagatgtgaagattcacgattttttggcgagcgatcccaggtttatatccggtgatttgagccatgattgcaagcaaagcatagcattgaaccatgttaaacacctgacctagcaggaagtcattagacctttggaatgagttcaagtataacgtatcacctagaatagagaattggtgggtgtgcatacaaggacgcaagcaacccttcgagaactcccctggattccagaaagttagaatttctccacgatcatcaataccccttttcagattatggtagatcttggataactggtcaaacataagaccatcagagtttgtccaacgacgtccttggacaccatagactcgtcccatatcatcctcgcctttgcgatatgggttatccaaccatgcaaggttttcatttgcattagcattccatgtattaaccccgatagcacggaattgtgctgcagagtcataaccacgtagatagccaatcatttccattattgcttgttttgcaaatgccttacgagtagtaataagaggaaattcattggcccccacattaaaagtgaaatctgcatcaataatagtgaggcaacgtactcctgttctaggattagttacccactgaccttcttcgagaatacgttttcctgtttcaatatattgtttcatttaaacgttaccagctcctgtagaaagaaaagggttttatccgcattctcccctgatgcatactccattctggttgccatcgagttagccatagtaatatgtggatgcaagtgtacatcagctgataatggtgttgctgatgcgattgtcgaaacatatgccatatctaggtgatttttagcatacatttctaggagcaaagctgctccacccaatactactgttacttcttccttaaagaattcaggcaaagtatacccaatgctagtaattcgggtaggacatccaatagtttccggtaaaggcttattggcattggcatagataaatagatcagaatcccctaatatccgcttttgaatcgtttcaggaaaacctaaccacgtacctgcaccaataatgatattatctggagctagggaatctagtgtggcataaaatatatctagttcctctttgaaggaaccccaggggagtttaccattgaggccgaattcccctttcggcccagttgcatagattgctgctatcattagaacatgccctcaaattcattacctaggtctttcaaggtatcagttgaagtctcagttacctgacctacacgataagctgcaccaatctgaatttcctgtggagcaggttgcagagaggtagtatctagccagttcatgatccacggaatcggattcttggtaattacaggcagattgctcggccattctacgccaatgtgcataaatgcgttacgtcctacgaagtaaaggtattcttccagaagttctgcgttcagtccaatcagactacggcctttaaagataaagtgaccccagttgatctcagtttgcagagttttcagaagctgtgctggtgctttagccagagcttcatcaatcagatcttggtcaaactgctggaacatgatctggataactgctttggacatctgagtatgcagggcttcatcttttgcgatcaattgcaggtttttagcaataccttgtaggatatcattttctgctagagcaaaggtacacgcgaaagatgcgtagaactgcattgcctctagcccatagattgcaaagtaagcatctaacagtttagcctgagtttcgcgtttaacttcagggaactcagtttctggataagtattatccccacgatgatcacgtactgcgatgaagtactggcctaactgatacagttcatcaaatagctctacagaatctgcgatacgtgcgaatgcttcttggttcttggtaacagaatcgataaattctgctggatcagtcagaacgttacggataatgttactataggcacggctgtgcagatcttcgaagtagctccactgcttcatcataccttccaattctggacggcttacgagtggcataattgctgcttctggcgcacgactaataaatgagtcggtctgagtctgccatgctaaattcaggagagtaatttcctgaatatctttaggaagattaggccattgctttttgtcagcttctagactgatttcagtttcagtccagaactgagaacgttgtaggagtgctaaacgctcaagttcaggatgcgctacacgaacgtaatcagcgataccgagagaatcgcccaggaaaagctcagggttagtatgatcccaattcaggtttagtaaagtagtcattgattttcctctttctcactatttcaggaatattatagcaaatcaggtagcgattagcaagtaaaatttcaaagaaaaaggagacccgaagatctccttagttttattaaagttggcaaccacctgaggcacaaccagctgcggcttcttcacctgctccaccaccgttttcagtgttgaagttagcgtagtaccaagtcttccagccatacttaacagcagtcatgaaatcacgaactactactgggccaggaattatttcattctcaaacttggtgtagtcatagtacatgttcgtactaatggactggctgaagaatttctgcatagttgctacccacttgatccactcaatgcgatctacatcataagccagtttatagctcatgagagtatcccaatcagttgcacccggagcaattgcaattactttgttcactgcactacctttgatagatacaatcttacgtggtggctcaattgagttagtaacacctaacagtacagaggaactttcgccaggcatctgagctgtcagaacagagttacgcataccatatttcaggatatctgcacgcagagattcccaatccatttctagacctactgataccagttcatcaacagttttcttgtacgtgtcaattaccagagttccttgagaaggtttggtacggttaaaccaatcacaagcaccttgttcttttgccagacgtacagaggctttatgcaggaagtaagaaagtttctcagcttcacggtgaatccagttacgggcttcttcaccttcgtacgccaaaccttctgctgccattgcaccagctgcgttcatcagaccaatacctacattacgacgcttcttagccgtatactccatagtcgggaatggatagtcttgaatttcaatgatggtatcaacgaatttcagaaggatgtagcaagttttctcccattctgccagagagctcatacggcctagaacaaccccgcctaggttacatagggatacttcaccaatatcttctggacgcatatcatccagctgatctggagttttgtacagttccgtaatatgttggaatggacgggttggctgagtaatttctacacacaagttggtcatacgaatcgggtcaaggaagttcccatgacggttagattcaccaatgtggtgagcatacatacgccctgtttccatacgaatacgtaaccaagtatctaggatttcttttgcagggattttaggagctgctggaattgtttttccttcgtggtcgatctttgtaagagatgccacacgtttctccgctgccacatagatttcttcaaacttagcctcatcttcaccataaaacgcttcgtgaacttctggtgcatagaagtaagacatgagcgtaatatcttcgtttttcaggtaacgttttaacagaaggttgttaaagctcagagagtagtccatcttatcgattttattctcgtctgtagcacgttgctgtttaacctgcatcaactgaataatttcaggatcgaagtacggataagatacagtagcagaaccaccacgggtttgctgagtgttcgcctttactgaacggtcgatgtgtcgataatatggcagttttccggaatgcgggaatgccccatttcgcaccggatcagcaattgatcggctttcaagatgatacccgattcccgctcttgctgcgaccattttgaagacgatgtgctcggctgtgtcgattgaatccagagtgtcagtggaatccacgaggcagcaactagcaaatccacggtcactagagcgcaggccaaccaatggtggtgtaggaacgttgattttgtggagcgacattgcgttgtaaaggtcgattgcatccagaattgtccagttaggttgagataacatcgccattgccatacccatgtaggcaaactgcggggtttcgtaaatttcgccagttgcgatattacgacgggaatacttatcaaagaactgtttcagaccaccgctagtgaagaggcgatcgcgttcatgatcgataacaccattcagagcgtcaaactgttcatcggaaatccatgcactcatgtcttcccaggcacctactttaaccatgtggtcatggaagaagcgtaaagaaggtggttcataggaatcatataggcgtttacgcatctgtgcaagacgtaattcctttgctacctcgtcatatgcaggattatctttgatcagaccttctgctgctttgattaatacatcttgaagtgtatcggaatctacaacccctttaggcagatttttcagtgcagccataactacggcagaccagctaacgttagcgttcttacacgcccatgcagcccaatcgttgagtttttcaggagcaaagtcttgaatagtaccgtcacgtttaattacttttgtgattctaaagtccattgcggtttccttcttatagttctcaggatttagatagtattctactttgttttgagtcattatgcaagtacaattttacattattcatgtctagcgaaatcgccatgtagttcttctcgccatttaatagcgtattcgttagctgcttctgcggtaggaaatcctctcttagaatactccttaccattaaccctgatacgtactctccagttattcctttctttgaatacgttcttaaaaccagaagaattatcttttcttagtttggcattacacatattttgtgtattattagcttccctaagattatcaggacggttatttaaagtattaccgtctctatgatctactataccctctggctggtatcctttatctaggatgaaggatatgatatgtgccatatacctttggtaattatagcacacaatcatatagtttccagttatagtcccagctatctttactttgccggatttcatccttctcattagtattcctgtttcaagatctacaaagaaggttttctccagctcttccttggttggatatataagtctttccatttaagtgtcccagtataaggataaaaagagcccggatattttcatacccaggctcgtctgtcttaccatttaattttatcggccatatctcttaatttctctcgtatttccttagccattaaaatatctacggaagtattcaattcattatagttaaatggtcgatttgggttagaggctacaattttccatgctagagaagtcttaggactttcttcaccctctttacgggtgatcatgtttgcagcactcagtgaagtgcggtgaattttagttttgcgatgtagatgtacgacatttcccatatcacaccagccccatctctttaaagatgtcatagaatgctttagattctcgggaacgtacgttctcaataagttcaatcattgagaaaggagcgtattcatacttttgatacacattcattagaagtgccaaacctgaatcacccttaatgtctttttgagctatatctccacaaattactaagcgacaatcttgccctacacgagttagtagacagatcattgcttcgactgagatattctgagcttcatcgacaatcacataggagttgttgaaagttcgtccacgagcatgttcgatagccaggaatttaactttctgacgttctacataccccttataagcttgatcaccaatggcccacttcatgccatctgcaatcggttccaaccaaggttctaacttttcagctaggtcacctggtagcatcccaagagatttgcctagaggttcattaggacgtactagaatcacttgctcaatattagagcgaggattagtaagttcctgagcagcaagaacggatgggataaaagtcttacccgtacctggttcaccaataccaacggtaatagtgttgttcctgatcatattgatatatgatttttgctctttgtttttaccttctagggatttagcaacgggaatagcaaaatcagagaagtttccctgaatgatgttatcttcgtagttgctgttacgctttcttgacccattacgggtttctcttttctgacgcggttttcccataaataacactcctatagtgtacttcgctaacagaggatcaacaaaaagatcttgtttatcaacttacaaatatattataccaatatctacaggaaaaagcaactacaattttaaataagcctatgacattgcagttaaataaaaaatttacttgcttagagagggagatgtatggtactagataatcattttatatcgcgtacatgggcgcgggattataatgtaaaatagggcaaggtgtcaacaacaattttgactgaaatcaagttacttagctctttagaaaatttatattgacatacgccttcaaatgagctataatagtagtcttagttagagaaggagaatataatgaactacggtattaaaatggctactaaaagaatgcaggatctagttagaaactgcaaggaaattattgaaggttcagcagatgaagaactgctatttaataacgctaataaaccctcagaacgttttcctacacaaagggatatgcttgcaggtgagttgagtaagtatctgattctagaagaaatgccaattcagcttcgaaatgctcatatgattggtgatattcacttccatgatgctgactatgcagctctaggtatgactaactgttgccttgtggctttggaagatatgttgaagaatggcatgaaggttggtaatgctgaaatcagtacgccgaactctatcactactgcggcagctattacagctcaaattattactcaggttagctcccatcagtatggtggtacttctgttgaccgtctcgatgaagtattagccccttatgttcgtaagtcttatgataagaaccatgcgtttgctaagcgttggactaaggatgaagctaaagcatccgtaatggctacggaaatgactgagaaagaagtttatgatgcttgtcaaggcctagagtatgaaatcaatacgatgttcaactctaatggtcagagtccttttattacatttggcttcggtctgggaacttcttgggaagctcgtctagtacagaaagcgattcttgaagtacgtatggatggtcttggtatcaataaacgtactgcaatcttccctaaactggtatttgtacttcgtgatggtgttaatatgaaacctggtgatgttaactacgatatcaagaagttagccatgaaatgtactgctgaacgtatgtatcctgactatatcagttatgataaggtggttgaagttactggtgattacaaagtttctatgggttgtcgttcattcctggctgctgcggaagatggagaaacttcaggtcgtaacaacttaggtgttgtttctgtgaaccttcctagaattgctatcgaagctggtggagatattgatctattcttcgatctgcttgagctgcgtgttgatactgcacttaaagcattggagtggagggttgatcgcttaaagtacattcaagctaaagctgcgcccatcctctatatgtcaggagcctttggattacgtctggggccagatgaatatgtatttgatcatttctataagcgtgcgtctgtatccctaggatatattggctgccatgaaatgctacagttcatgtttggtaaagatgtagatacaatgtctgatacatgtgttaaatttgtgaaacgtgttctacagtatatgcgtgatcgtgcagaccagaagaaagaagaaactcagttaggttatagtttgtatgcaacaccttctgaatccttatgtgatcgcttctgtcgtctagaccgtgaatatttcccagagcatgaagatattcttggtaagggttattacaccaactcccatcaccttgatgtggaacgtaaagttgctccaaacgtgaagtttgattacgagtctaactttactccaattgcttctggtgggtgcatttcctatgtggaattgcctgatatgaagaaattccctgatgcattggaatgggttattaactatgctgcaagtaaggttcattacttcggtattaatactccagtagattcctgtggtgagtgtggattcttgggtgagactatcgcttctgaggatggattcaaatgtcctatctgtggaaaccatgatcctgaaactttagaggtaactcgtcgagtttgtgggtaccttggaaacccaggagcacgtcctttcaacccaggtaaacaacatgaggttatgggtcgagtgaaacatagagacgttcgcgctaagtaagtgaatcagccaggttgctagtcgacctggcttttattttatttgctttcagctaaaaatttgtgtataattgatttataaatttgagaggagaaagctatgggcgatttgcttcctaaagtagacgtttcatatttgggagagcctagtgaagaacgtaaggctcttgattggttaggttactttgatgaacgtgttgtgctgcgttccgttgtgaaaggtaaggcaaagcattttagaattcgatacattcgtaaaggctttggccatgtaacaattgattatatcgaaaaagctggtagtatctctacagaaacaatttataaggttgaagaatgaaaaacgtaaaacatcttaaatatcgcttaatttacaatggccgcatggaaacggaagacctcgctcaactggcgattaactcagatgaagttacggttcgtgctttatccatcgagaagctgcgtgcatcttatgaaactcgtattatggaactagaggagaaactatatggcattctcgaatcagaagctaccaagtgatcaacttcaagatgctctcagtaacgtgttgatggaaaggtggaatgaagggtacaaagatggtgttacctcttgcgctataatgctagaccatatagctgaatccttgagggatcgtggtcaaccagatattgctaccatattgcaaggtcttagtgaaaacttccgagagcaggtgaaaaatgcgtagactaattgttgttagtggtgcaggtttaagtgttgatagtggcatccgtgcatttcgtacagatactgctagcggcaaagcaatgtgggatgaatacgatctggaagaagtgtgtgatattcatgcttttcgtggacagttctactggaaaacccatgagttctataacaagcgtcgccaagagttacagactgttgaacctaacgttgcgcatctccgtatcggagaatggttccagcggtatccagaagctgtattgaacatcactactaacgtagatgatttgctagaaagggctggtgtgccaaaaagtgaagttcttcatgttcatggctacttgcccgaagttcgtattaaggaattgccagatcgaaaagagtacatcctagatgtggggtatactgctattaatcctgatgaattttattgggcaaagcctaacgttgtgttctttggtgaagcagctcctgagtatgctttgatgcatgctacttttgatagtcttacggctaacgatatggttatcgtggttgggtgcagtaaccaagttatcaacttcaactgggaacttttccctgccctaaatatgggtactaagatgatgattgtgaacccagccgttcggtacgatgaacagcttgagtatgagaaacgtggtgttactgtgtggcgtgctggagctgccgaagtttttggtaacaaacactttattggccaagtagaagcttttatggaaggaactgtttatgcaccgcaaaagcatgtgtgatcttttagtatggccggacggtagttggtgctaccgttttgaatatgctactgatgatttctcgtggaagagtgatgatttctgcgttatctacgaagatacggcagaatggaaagaattcctaattaaggagggagaatatggtgaagaagatttttaagggtatctggaaagcattggtgtggacggtgaacctgattggtatgattactatctataccttgtttatggcggctatgtttggaaaaggtaagatcgattaccacgttcctttctctgatgaagctaaaactctgcaatgggataactccggtggatctaagtaatactccaattatttttctggatattgatggggtgctcaattcgagcatctctcaccatcacgctccggacgaagagaagatcttctttggtggagattgggtttttaaacccctactccaagcatttcagaacttcttaaaaccgtccggcataatgattgttggggtttcctcatggtttacagtacgtaacgaggtagagaatgttgagattatgactgccctaggtctggtcgatcgttttcttggtactactgattttactggtggcgggctatctagaggcaactctgttcttcggtttgtggaaaagtacaaactcaagcactggtgtgtcctagatgatgctggagctatgatgtaccagtatccaacagttattgtcaatggcagaactggaataaatatgcaggatctgaatgctatcagctacatgttggagtttagccctgatctagcaatgtgtaaagccctccaaaacttaaaggtatagatatgtttaataacctctttgaaaacacagtcaatccaatccttgttaacttctggcgttctctgccagataatctgtttgaggaagctatcaatactctcaagatttggtgtgagaataacgagattgctttcgcatttacttcagactccgatgaagctagctgtattggtgtaagtgtaatgctggaagatgggatagaagagattgtagattggaaagagctggactacatgggtctggtttttgctttgaactacaagctgttcatgcctattaaacatcgtttgatggtaaattatcgtaatggggaagctcctgctttccaggttaatgaacgtgagggctggaaatattcacctgaagaagtggatgctggcattcaaaaacttcgccgttttggatatcagatcccaggtttaactgcttaaaggaggcagaatggaacaagtattttggcgtcagattgatcctagtttggtagagcgtgctgaagggcttctcgctcgttggctgggggcggttaaggtttcggtatctttccctgatactcaagtagatgatcatagtctaggtattttcttggaggttcacgttcctgaactggagagtactgagtatgtggaaatggattggaatgaggtttcggcgatgggtctaatagttgcccttaacttctctatatttcatccacgtggtttggccatagctcgtgatccccataatggtgaatccccttatttattagtggcggatgatggggtttgggagtacactcctgagatcctagaagaagctaaaaatcaattaaaccatgttgggatttatgttcctggcttgaatgacgattgattttcagtagctcaatcctgattaccgagtcattttggctcggttttctctgtactcaagaccaatgatagcaccgtcggaaaaattttacttgcaggatgcttaaaaagttgatataatatttatattgaattgagagacattagtaaaaattgattttgctaatttttcttgtttacaatccgcaatacggaacagttcggctgccccattaaaggttgttttaactgttacgtgttagtttttgaataaatagttaatagaatacttaacgatctgcgtcccataggaaccctggtaaggcctcgaagcaacctagaatgaggtggttgtgaagtgagatgggaggagtgaaaaactccgagacgtgattctgtaagttatattgcatctagtatgagctagtatatgaagcattaggtgaacaaatctggcttagcggctaccctcaaggatttgtgcgatatagcgaagcagcagcgcagcgtgaaagtggaagttgccaccccacttcagtatttgaaattagtttgttggagaattaacagtaacagttgttctattctttctgaatagtcctaaagaaaactttttcatttcaacacaggagtagtattgtgttctcaatcctacaaggtcacgcaggattttcccgcgatctggcaacagggatgtggaaagaggttaaagtagaggattatacctttgctaagcaattctcagcttcccacccagaaggtaagccagtatccatgcctttcaaatttgatgtaattgatgaggttgatccgcaaaccctagtagaaatgcttcctcttatgagacgtttaacgtctgaccctcatatcgttgcggtacgaggtcgctgtcttgcacctagaaataatgtgcggcgtaagaagggcaactttaatgtatctaatccaagccacattattgcaatggacgtggatggtattgtagatacaggtggttgtaacaagtttgatcttgttggcatggcacgtcatatcattagaatgttaaatagtattagtgaggatatgtttcctcttgacgcagggtttatagctcatgcatcatcttcggctggtctaaaaccaggtatccgaatgcacttaatgctagaatctaatgtaaaagtgacacaagggcagatcaagttcctattcacatctatcaatgaaagtagtagacaaaagtacggctttgatattgccgacttagcttattactcttcagttcagcttcattattttgccgacccattattcaccgatggtattgttgatccgtttaaagcggagggcgcttcacgtttggtgtttgttaagggttcgaaagtaaatttacctaataatctcgttgactatgaaacaactagaggtgagttcaaagaggaatttttctccttgttagatcagattaaaggcaaaaaggccgcatctgataaagtggaagaaactatcagcgaattggaagaagctgaggatggtgtatatcttcgtattattccaaaactgtatcacagagcgttagaggatggtatagatttcaattggctagagaaggaaattcacccggctttatcagagtatattgcaactaaggataatacccgtaatattcaagactattttaataacggaagaaagcaggcgttaaaagcgtttgttaataactctaagcgagagattccagaagtcttgaagggtatacctcttaaaaagttagagactaactcgctagaaactgataacttcctgaaactgaatacagttccaccggaaggttatatgacgtttgttaaagctagccttggaacgggtaaaactactgctgtagttcgctggcttgactcaggtgtgatcgaaggtaatttccttgcagttactaacactagggcgctggtgtcctcaaacgccaagaaattcggggcaggtcagtatgataaatccgtagatatgcttaactttaagcgtggcgcgattaatcgtatgtctacaacgattcattcattacataagttcaaaagtttcatcggccagattgatgcaatctttattgacgaatgcgatgcagtaatgaatgatctattgtttgctcccgttgttaaaaatcgccgtgaatgtatccaggttcttcgggatatccttgcaacggctaaaatcattatcctatctgatggtgatattagtgcagaaactatcgaagcatacggttctctgattgagtttgataaaccagtagcgttctataatcatcaccgtaaaatgctttcaaaagctcatgcttatgagttccctgatgaatccagtatttgggtagccctacaaacatccctagagatgggtgagaaatctattctagtttctgactgtggcccagatgaactgaatgaaaaggggatggcattacgtcgtaatactggtgctttagttaaagaaattcactcaaactccacttctgatgtagatattcgtcatattctggattatacaactaatgagctgattgatcaacagattgattgtttattatgtagtccgtctgtaacgagtggtgttgactttaactatttcgataacgtttttgttatcacccgtacaagtaaccaagcgccaaacatgcgcttccaggcaatcaggcgcgaccgtggtgctcagaatatttattattttattgataaatccacgagcggtttctctgcgggttccgagcagtataatattgatgaaggctggattgagttagcccaacaattatacgcacgccgtcgtgaactggagtctaggaactatacgagtactttacgttattacctattagatcagggtgcaactatcgatattttcagtgaaagctggggtactatcgaaggcgcaggcaaagagtacacagaagaaagaatcaaagcaattctgcattctactcctgactattgtgctccacgtcatgctgatgcgtatgaatctaaacttcttctagttcgttattatcatcttgattccgtcaaggatgttacagttgaacatgtagaacagtatatcaaggataaacccaatgatagggctgcattcttccataagatgcatgatatgttctgggaagatattaagaaatgttcgaacgtaactattaaaccatttattgaagctctgaaaggtaagaagaaagatttcttccttaaaactggtcaaagtgctaacccaaaatatgctcgtatgtatttaggtatgatgggtattggcaaggatctagacacagagaagattgtagactggtatagaacttactgcaagattgagtgtattccaatcccagttaagtttatgacggatgaagagcgtcagatgcatgaggaagctctggctgaattaggtgctagaaatgacagcgaagaataaaaaatgggaaacaaggaagtttccagttaaagagagtaaacgatctgaatatgatactgcggagaaactatgtagggttgtaccccctcgtctcgcaggcctccctaatgtctccatatggttactaaaacaacggaagactcgtgtgtctcttcgcgttggcttcgaattagaaaaagtttacgcggagctggcttctttactcaaagaatcgtaaaaatttatttgctttcagcaaaatttttctgtataatagattcataaatttgagagaggagtatttatatggctggttctcgtagaaagaaactaatccacgaaatccctgatgaaacctttaaaaaggtcattgaacatctggagaatgggggtacgaagaaagctgcatgtgaaatgcttggagtttcttctaatccgacaatggaacgaatgattgaagaatggcgtgatcgtcagattcaagttgcggaaatgaagaagaaaaagcgtggcacactgattgaaggtgttgagcttgcaaacgtaattgaacagtatttatctggtgattctttcgaagaaatcgcagatcgtaactatcgttccgtagctatgattaaatctgttcttgaacgttatggtgctttacttcgtttgaatgatattgttgatccactgaatccaccattgattcctgatgatgcaatggcagaagaatttgaagttggtgaacttgtttgggttcctggctatcagtgtattggtgagatcaagaaagcaatgactaatccggttggatgctatcgtgtatggttgttatctgaaggtaaacaacagaacgtgcactatatgcattacgaattagcatctgtgaaacatctggaaaaactaggagttgatgttaaggctcttggttttaaatggagtcgtgaagaagttatcacgttagttaacgaagctgttaaagctgccttgaaactcgataaagagaaaggaaaacgccgtgagtaaacttaccgagctattaaaagctggagacgtaaaatatctccagcgagattcttggggaaatagtaaagttgagaccgtactcctagagttcgatgtggatactggaattgttcgtgaatgcacatggtatgaggagaaaacaccacctgtggtacgtactgtgtatttaaccctagaagaagcactggccgacgattgggagatcgttgaacctgattgatgtgtagcagttactgaaaaatttcagttgctttatcctgtaattcttgatataatattctcatagtttgaaagaactattctgtttaattcttaattaaggaaattgaaaaatatgactactccaactcagtggactgatgaactgttcgaaaaaatgtcttccgattatgttgctcgtatggagcaattcccagaagatgagcgtccgggcgttagcatggaaattgttagcgaaattgcccaggaaaacggtgtaactccgaatggtttccgtatgaagctgaccaaagcaggtctgtatatcaagaaagctgctagctctacttctaaatcaagcgcatctactggagaaaaagcttctggtggttctcgtacttctaaagcccaagcgcattctgatctgcgttccgcattctccgatgcaggtttagcacctgacttcctggacgatgcaattatcgacaagctgaccggtaaagcagctgctcatctggcagaagctatccgagctatcactaagtaattcttagataaatccaccaacacaaggaaatccagttatgaacaaagctgaaatcattgcacaatgcaacaaatttggtgagttttatctccattacgagaaactgcgtcagaaaggaaccacgtaccttcagggtacgatggaatttgatcctgctcaggacaagtacctggcagagcgtattaaacgtgagcgtattcgtaagccgaaagatgatgaaatcctcgttttctctcgtactaacgatagcttccgttttattcctgttgcaaaagttcgtcgtgtgacgagccttcaatcagagttagatcgtgcttctccagtaggccgataagaaaacaattagcccctatatggggctttttgtctatttgagaaacgtaaatgagcgatcaggtaaaccaaaactatgaaggacacgttgatgatcaatcaatccttctgtgggaaaaggaaggtgaacaagtaagactgacggtatctgaatttcgtgggaatctatacatgggaattaggtattggctccaggatattactggagaatggtttccaacgaaatccggcttctcttttccttacactctagatacaacatcacagctattctatgctttcacacaaatccttagtgaatctgaggtattgcatgaagtacagaaaagagctgaggaaatcaaagccaagactgaataagttcttggctttttctttataaatgtacttgcttccagctcaattttaatatataatattcttataaattgatgagaggatcaattatgaaagtaacacttccaaaaatccaagcaaagctaaatctagtatctcaagctagaaataactatctggacaacttcaagggcactaacgataaagcgtacaaagatgcgtggttaaaagaagccaatgaactagaacagttagttgcccaatacaataaagaattacaggtagatctgaatgactaatgtaaaagactttatcaaacgttgccaagatgcgtattaccaagggattagtattatttctgatgaagaatatgatcgcctgattaaacgttttccaatggcagaagattctatcggcccgaaaggtgatatcccccatctgtatcgtatgtactctttgcagaaagtttattacgatcgtggtgataaagctccgttcaatccacttggtcaagttgaaactgataagttagatggttgtgcgatttctctattatatattgatggagaatttgttcaggcattaactcgtggtaacggtattctagggaatgacgtaacacataatgttaaattgcttaatatccctaaaactattagccaaaaagttccaactcagatcactggcgaagtcctgatcactaaagaagttgagaacaaacgtaactatgcttctggtgctattaacctgaaagaagaagatgatttcatcgaacgtattggtgaaggtggtttaatcttcgtagcttacggtattcagtgttctgcggaaacagtaggtatcacagcccattatctcagtgatatgatctggctggaaaatgagaacttcttaacagttgttaacgttcgctcattctttaaatggattcctacggatggtaaagttatccgtattaatgataataataagttcttccgtgaaggatggactaataaacatccacgtggtgcatttgctgttaaacaggatgaagaaggtgaggttacaactcttctgaaagttgaatggcaagtaggtgcatctggcaaagttactcccgtaggttatttcgaaccggtaattatcgatgatgcaactattgaaaaagctacccttaacaacgttgattatattaacgctctcgatctagagattggatgccaaatccgagtaatccgtgctggtggtgtaatcccacgaatcgtagaacgagtagacgattaattacaaaccctttgctacccgttgaccgtaacggaattataaagtggttattgacattttcgccgcttaggtatatactattatcattcagttgagggatagaaagttatggcgagggtaagcaaagttagttaaaattgtatttgctaaatgcttaaatacttgctataatatttatataaattgataaggaagaaatttgatgaaaatcgaaattccaacacaatgtccctcttgtggttctaagctagatcttgttaacggtcaattattttgccgtaataagtcaagttgtccggctcaatcaagtaagttaatcgagaacttctgcacaaaaatgaagttaaagggtttcggcccaaaaactattgagaagctggaactgactaagatctcagaactgttttacctgaccgaagaagatttggtcggagctgtgggaagcaaggttgccactaagttagttagtgagttaaatactaaggttcgcggagacattgactttggttcagttctcggttctttaggaatccctctgattggagaggtagctgctaaaaagctatcccagggttgcactagctttcatgatgtgaaagctgacggcaaagctggagaaaattataaagcctggctaaattccccacaaggcaaggatgttatcgaactaccatggaaattcacaaccggtattaccggacggaaagctgatgtaatcattactgatgatttagtcgctcaacctaatgggatcgtggtatgtattaccggttctttgcaagattttgcaaacagaacggatgcaacaaactatttagaaagtctaggttacacggttaagaagtccgttaccaaagacgtaaaatacctcatctgtgaggatgaatcaaaacgttcttcctcatcttataagaaagccgaaacgaatgggatagaaatcctgtcgattaaagaactattggagaaaaataataatgtctaaactgaactggaacgtagaaggtgtaaccgagtctctgaaagcaaaagctaccgctctgggtgttgctgtaatctctcaagaacaagtcgctgctatcgctgctgaactggcaactgaaactggtaaggacgtaactgcacgttctgttggttccaaactgcgtaaagaaggtttcgaagtacagaaagctaacgaagtacagaaatccccttggactcctgagcaggaagctgaactggttgatttcctgaactctcacgctggtcagtatacttatgctgaaatcgctgctgctgtagctggtggacagttcggtgctaagcaggtacagggtaagatcctgagtctggaaatgactgctgctgttaagccaactgaaaaagctgccgctgttcgttccttcactccggaagaagaaaatgacttcgtaaatctggttgttggtggcgctactatcgaagctatcgctgctcactttgatcgtaatatcaagcagattcgtggtaaggctctgagcctgcttcgtgaaggtcgtatcactgctatgccggtacaggaaacttcaagtgctaagactcgtgaagatctgttagaaggcctggatctggcttctatgactgttgccgaagttgctgagaagactggtaagtctgagcgtggtgttaagtctatgctttctcgccgtggtctggttgctaaggactatgatggtgctgctaagcgtgctaaactggatgcaaaagccgctgctgctgaataatctggtaaattaaacctaaggggagggggctatgctccttcccctttttgcatttagaaggcacgaaagcgtgcaaaggagaatgaccttgtttaacgtgcaagctgtagtgttgaagatgcttctggcttctgaacagaaacaaatagcattggaaacattctcaaaactgcataaagatcattttaatgacgctttctcctcaatttaccaagccgtccagaattattataagaaatataacgcaatgccgtccattgacgcactgatgcttgaggccaataggaacgcccgcctttctcaagctcttgtcgtcttagctaacactcaaataccagaagtgagcatggaacaggcacttgaagtcctagaagctgagtatacacaggatctattcctgaaacttctagaaacagacgtgcttcaagatttaacaatgctggatcagggagaaattctaaaccgagttgcctcccttcacttaaaattagaagagaaagtaacgaatactggaaaggtattcaacgcagacacaatgcgtattttccagagagaagaagataccaaactgaacttaattgctcttggtatttgtaatgagttcgacgcacaaattggtttagctcgcacagaaacgttactgcttggtggttggcgtggtactggtaaatccattatctgttcaaacatacaggttcagcaatatttaaatggagatattgctccatatttctcaattgaaatgaaagagcatgaggtgtttagacgtaatttagctatgttagctggtgtttccgccttagctatgcgtaataacactctcgaaggtgctgctttactgagattagcaagaactagggctagaatgtttaatggtggtgaagagcttttcgacaacttcgttaagcagtataacatggctaaaatgagcgacttctatgatatggaaagtaaacttattgaaagccatgagctccacaccccaatgatcatcgtgtatgatcctgagctgtcaattactacagttgatgtagaattaaacaaactagttgctagatatggtgataaagttactgtagctcttctagactacattaaccaaaccagacttcctgattccaagactattgatatgtacgattggaaagaacagatggttgttagctcctctttcaaatctatttgccagaaacataatgtggctggtatagctccttaccagattgaccaagatggtagaactcgtatgtctaaagggattcttgattccgcagatatggctgccaaccttaatgctgcaaaagctgataatggtcagggtgctattatgtttgacttcgtaaagacccgttcctctgatagtgtgaagtttatgcctaagatgaactgggagaccctacgtttagacaataccactaacctagcaatggaagatattgcgcaaatggaggctgagtttgtaattcctatagagaaagacaagccagctcaaccaaaacgtgctaagaaagagaaaccagaaaattcatcaggtgaacaggccagcgatatatgagtagaataacagaactacttgatctgaaaggcattgaatacaaagacacaggtggggacatcctcatctgttgtctcaacccagatcatgatgataaacatccaagtttgcgtattgatccagaatctggagttatgcactgcttgagttgtggcttcggtaaaggtataccgagcatttaccattattttaatgagagtcaataccgacagtccccaagattgtcacaagtacgtaaaaagatttcagagattaggaatggatctacgaatcttgcaattcctgaatctgcttaccttttcgaaggtgatttccgaggtataagttctagtaccttgaagaaatattttgctttccaacatcaagcagactgggaaggcagaatcgtgttccctatcacagatgctgttggaagaaatatcttattcttaggacgttcgataaacagttctgcccctcctaaatacttagtaaaacctaaacaagtttcaccaccgattttccctgtacgatataatactcctgttcttgtcttggttgaaggtatctttgatatgcttaatctagaagataatggagtgaactatgcttcttgctgttttggtacacaccagttcactgcagataatattgctgacaaattcagtccatacattattgcaggagtcaaagttgttgttattctattagataacgatgcttctggtaacaaagctgcacaggcgcttgccaagctaattcgtacaaaaacacgattaacacctgtagttggtaatttccttcttccagagggcaaagacccaggtgatcttaataaacaagagatcgatacgttagctcaacgtattgaaattttagttgctgaatcgctcaaagatttggtataatatattggtaagttagagaagaaacactgaagttatacttacttaccaaaaggagactaaatttgaaaattgcagtagttgacaaagctctaaacaacactcgttacgataaacacttccagctttatggcgaggaagttgatgtattccacatgtgtaacgagaagttatctggacgtttgctgaaaaagcatattaccatcgggactccagaaaacccatttgatccaaatgattatgattttgttgtactagttggtgctgaacctttcctgtatttcgcaggtaagaaaggtattggtgattatactggtaaacgtgtagaacatggtggctatgctaactggattgcaagtatcagtccagctcagttacactttaaacctgaaatgaaaccagttttcgatgcaaccgttgaaagtattcatgacattattaatggtcgtgagaagattgcaaaagctggtgattatcgtcctattactgacccagatgaagccgaagaatacatcaagatggtgtataacatggttacagggccgatcgcatttgactccgaaacctcggcactatactgtcgagatggttatctgcttggtgtttccatttctcaccaagagtatcagggcgtgtatattgactctgactgcattactgaagtagcagttcattatctccagaaaattctggatagtcagaatcatggcattgttttccataacttgaagttcgatatgcacttctattcctatcatctaggactttcctttgataaggcacataaagagcgtagacttcatgatacaatgctgcagcactatgttcttgatgaacgtcgtggtactcatggtttgaaatctctcgccatgaagtatacagatatgggtgattatgactttgaactggataagtttaaggatgattactgcaaagcacataaaatcaaaaaagaagatttcagctatgatctgattccgtttgatattatgtggccatatgctgcaaaagataccgatgcaactctgcgtctacataacttcttcatacctaaaattgagaaaaacgagaaacttcgtgatctgtattatgaagttcttatgcctggttgtgtattcctgcaacgagttgaagatcgtggtgtaccgatctctatcgatcgtttgaaagaagctcagtatcagctgactaacaatctgaatgctgctagagcgaagctgtatacttatccagaagtagttcagctagaacaagatcagaatgaagcgtttaaccctaactctgttaaacagctccgcgttcttctgttcgattatgttggtttgactccaactggtaagctgactgatactggtgcagattctactaacgcagaagctcttaacgaattggccacccagcacccaattgcgaaaactctgttagagattcgtaagctgactaagctgatctcaacttatgttgaaaagattcttctgagtatcgatgccgatggttgcattcgtacaggcttccacgaacatatgactacttctggtcgtctgagttcttctggtaagctgaacctccaacagttacctcgtgatgaatccatcattaaaggttgtgttgttgcaccaccgggttatcgtgtaatcgcgtgggacttaacaactgcggaagtttattatgctgctgtactgtctggtgacagaaacatgcaacaagtatttatcaacatgaaaaatgagcctgataaataccctgacttccactcaaacatcgcacacatggtatttaaattaacatgtgaaccacgtgatgttaagaagttattcccagctcttcgtcaggcagctaaagcaattaccttcggtattctgtatggttcagggccagctaaggtagctcattctgttaacgaagcacttctggaacaggcagctaagacgggcgaaccgtttgttgaatgtactgttgcggatgcgaaggattacatcgaaacttacttcggtcagttcccacagcttaagcgttggattgataagtgccacgatcagattaagaactttggatttatctatagtcactttggtcgtaagcgtcgtctgcacaacatcaactctgaagatcgtggtgttcagggtgaagaaattcgttcgggatttaacgcaatcattcagtctgcttcttctgatagcctcctgttaggtgctattgacgcagatgatgaaattctatccttaggtctaggagatgagatgaagattgtaatgcttgttcatgactccgtagtagcaattgtacgtgaagatctgattgaacagtataacgatattctgattcgtaatattcagaaagaccgtggtatcagtattcctggctgcccaattggtattgattctgactctgaaaaagggggttctcgtgactactcctgcggtaagatgaagaaacagcacccatcaattgcatgtatcgatgatgacgagtatacgttctttgttaaacaaacgttgctcgatgctgaattcgaatacaagaaaattgcagcattggataaagagcatccagatcacagcaagtacaaggatgataaatttattgctgtatgtaaagatctggagaacatcaagcgagttctaggtgcttgattttaaactgcccgtatatgcactacgggcgtttacctctatagagcaagaaggcgattattctgtaataactacaaggtataataaatatgtgctagataacaggaagttgcctggcacattttctcaacgtagacttgtcctatttgagaaaagaaaagaattgccgtataagctctaccctattcgtggtcgaataacaacactatctcaattgataggatctaaacgtacccagtttatagattctgatggaaatctcataaattggaagaaaactacgttctacgaggtagttacggccaaagttctgcattctgcaagaatttataatggaaaataccagtgctatgtggccaaagtaccatatccatttgtattatcctacgcacccgcttatataagctatattctggtaaataatagccctgttatttatcaagtccatcaagaggagcctgaaattcctagacttagaataaaattatgaaggttgttatatctaataaagcctatttcaagcccgatgatgaactttgggattattgtagtaagcaaaccacttatcatgtagagacaatgacaagtaaataccctattatgtataagaatagtggtgttgttgctaaagagattaagtggatccccattacccgtctagatttattagatgctaagggagttaaatacgaactggtcgataaacgcacgttggctccggtagagataccagaaccttcatttaaactgcgtgaagaagatcagttgcctatatatgaagaatgtgatgatacttgtattattaatggtaagccaggatttggtaagactattctagcattagcattagcctataagttcggccagaaaactctggtaatttgtactaatacatccatccgtgaaatgtgggctgcagaagttcgtaaatggtttggctttgagcctggtattattgggtctggtaagtataatattgatccacctatcgtggttagtaatatacagactgttaataaacatgcgaatcagctatctaaagtattcgggactgttattgtagatgaagtgcaccattgcgttgctactacattcactaacttcctagaaatatcatgtgctcggtataagatcggtctatctggtacattaaaacgtaaagatggtctgcaagttatgttcaaagacttctttggatataagatctttagtcctccggttaataacactgttgctcctgtaatccacaggtactccgtaccagtagagttatcaggaaatcagaatgttccgtgggcgttacgtgctaatgatgtatataatcatccagagtatcggcagactattattaacttagcgcatctgtatgtaaatatggggcataaagttctatttgtaagtgataggacagagttaatacaatccgtgctagaagcattgtctcaacgaggtgtagtaacgca

SEQ ID NO: 12 - DNA, 113949 bp, unidentified
  source 1..113949: mol_type = unassigned DNA
  misc_feature 1..113949: note = the genomic sequence of a bacteriophage
cgagaattgtaggcgttttgttatacgtgctgaagggaaatcaatcgaaatatgttcatttcggatagttaaagggatatcagtttcgggttcaatattgtagaacatatcaccagcaaatcgcttagtgtagtaaaacgcaattgttgccgaagcattcatctcgttaacataagctcttttattattatatattttgtttatgtcaaatacacttttatcttctctccaagagcattgctgttggaaggacatagaagcagataaaagagcaggtaaaatattactgtttgtagttactctaggaggactataagacataacctcgccctgaacaataccagcaggaggatacgtagatacctcagaaaacttaccagactcaataccaacattcagcactggaacgtttttatcaagagagaagtcaacgttagatacaaaacagttttcaaagtatacacagttattgtctttattaactatgtatatattaaacattgttggttcaatattcgtgctataaagtggtagcaggaaggtagtaccctctctatcaaagcccatccattcaaagaagttagcctcagtaagggtattactaaaatttatagccagcgatattgatgatggagtttgtgcgttaataacagagtcagcatagttggttctacgatgaatagtcctacgaagagttttaaattcctcgtaggaagtattgatatcatagtttgacagagcgtcaaagtgatacgctctgccatcatactcaactataacttttgactctcgcattagagagtagtacatttaattagccaccagaagcagtaactgtaatgctcttagtaccttctacaccagaaccgtctttagccacagctttaacagtaactgcacctactttagaagcgtcagcagttagcagaccggagtcaacatcaatagtagccgctgtaccagaagagatagaccaagttacggccttattagtagcttctgcaggcagaacatctactgtcatctggagagttgcactattttcaactgtggttgcgtcaccagcagacttaacagtaatgccagtaactggaaccggagcagcttgaccaccatcacctgtagcaatcaggttagcgatagtagttttggtatacttattagagaaaccaagataaccttcatcacctgtatccagatcggtagggatagccttgaattcaacagaagtaccaagtacatcgtcagtctcgatagttgggatgttaacgtgggcttgcttagcaactagaacagcggcagggcgctcatcatcgtactcaccgccaagaaccagggcaatttcgaaacggttaactactttcagggtcttaatcagatctttgtacaaatccatagaacccagagccttatcgttcagataagcagtaagagaaccggttagttcgaatgcaccagtaaaggaaccgattggaatgtttacacgggacatgatattcggagtcagataggtgatgttgttgttgattgtgaagctaccaccagtgatcggaatatcatatgccttaccactgtccatatccttaatcttcaggatagtcagtttgttcttaatataagaactttggatagtcatgtaagtttcatcatcaatacctacagtatcagggtcaaatggctgtgaatccagtggaatcagctggttaccattaccagaccaggttacgcgaccaatatcttcgatatctacgtttacttcggcttggttgatctgacaggaatcaatgtaactccaggctttatcggtaaggatatagatgtgcaacatagccagttcgtggtatgcgttatccttaaagttaaccatgaagttagtttcgttagtatgagccccagtatcgccatcgagatcgataggcttaccactagaaagcgcatgccataacatgtagtctggaacgatctgcttactagtagttttatctacgtaaggcaggatgtaagtagaaaagctccactcagcagcgttcaaggagtcgttgaaacgttttgaaccacgagttggacgcggaccagcttcgttaacagtaatatcggttgagttactgtcctgaccccaagaaatatcatcttgaactagaatctcttgcgtgttttctttggtatgaccagtcttaaccgtagacacgaagattcgagtattacgtaatagttgtaaagacatttatttatattctcctaatctgtaacttatctgcgtaatgcacgcttaggtggcatatagcgcactgttacatttatttccgctaaaccatatggggccagtagaccctcatctgtactaactgacgtgatgctcatatcagttgcctcgcatgggaaggtcgatccattaggtttactaacagtatattctaaatttccacctgtgtcaatgacggtttttatgtcagctacgagtttttcaagttgctcttgaatatctgtttcttctttgtcatagaccagaattggaagttctaaaaacatccactgttgacctgaaggaagatactgcccagtttcagttcctatatgaactgccacataaggaaattctcggatctcctcaaatctataagtttgacgagaaacgtttccataaaggttgttaaaatactcatctggctgagatccgtccatttgtgtggagattcggtcaaccagcgcttgtgcaatacttgttctgtgatccatttattaggttccttgattaaccttgattttatatctagagtgaatcaggtctcttgcagctttagctatcgcttccccaataagtttttgtggatttcttgctccagggtagggacgtaaagatagtctgcgataggtagatactgcggggttgaatactgagtaaggtctaaccatataattataggtcacattaagttcaggagcactacggcttgtttcagcgtcacgtaacataacatctttaattttaagggagttggcgaagcgaccagttctaaacttcaaaggtgctcctgctttcttcatatccttaataagatattctttagctactatttctagtatagctttcatattactatttgaaacaaatcgtcctgctgcacctgtaactgcacctgaataaccatcttcagtatctctaggatcaccaaagtttacctgaaccctaccagttgaacgtttcttaccaacggcggatctttttcctgccgtggcttgtatgaggttttctagagcgcctaagtcaccagaaagatctaagttagcggaaacagcctttaagatagaggctgttctaacatttaataagtcctgtgatacaggcttagagaatttgaatgatacttgcgcaacagtaccatctctttttggatctttaagcccagtctcaacagtgtacacaacagtgttcttattattttcagatcgtcctgctgtatctagctgctctttaataatctgtctagctaaatcagaaagagacattatactctcctgtagacttcgatgatagtacgaatatgctcaggaatacctgacttagtattgttaaacgttactgtttcaccaccaatagtcttggcttgacgataatcttgcttatgccagtgatccactaatagacatgcagccaacttgagatcttcaggcattgggttgaaaccaccttgtgtatattctacatccatatacccttctggtggactaaacttaaggagaataacaccatctggatacagtttgtactgttccgggtctatttcattctcattaatagtcatctttgtaactgatgtagcagaaggagaactcaaaaagtatttcctacggctaggtttagtagtgattaattgatctaccgcatccgcgtcgtccatacctaaaaggctagtaatcagcgtattggcagctttaatcatcatatctacttgagtttcaatttcaggacgttttgcattagcatatagtctgtaatcttcaacagtgatgatttgcatttatttttcccaataaaaaaggagagccgaagctctccttatcggctgaaaagcctgtattaagatgcagcgtaagcaccagatacaacgccgttctcaaagtaacgttgcaggttaacacgctgagtaacgtagtatgcgtcacgctgtttgccagcttggcgctcacgttcaacagtaacagcacgctgacgtggcattacgaagttgtccttgtagacgattactgcgaattctgcagaagcagccttagctgggaagtattcagaaactacaactggcagaccataaatacgaccaacctgaccctgcagtttaacagcatcgttaccaacctgagcaacatcctgccattcttcatcttccagcagatcgtaataagcatccatagatacgatcagtaccagcttagaaagcttcagaccgtgacggcccagtttacgacgcagcttagagatagttttagcagttaccagtacggaaccgtcagctttagcttcggtgataaccttagcagtgtcatcagcagccagtttcagaagacccttaggctgaccagtaccagtaccgttcatgaaggcttcttcgatagaaacagcgtgtgcttcgatcagacgcttacgcagcagaggcagcagggagaagatagcatcttcttcagtttcatcagtgatgaaggacttagcagccagcttgtaagttttgaagctaatttcagtcaattgacccttaacttcatcaccaacagtttcatcagtaccgaatttagaagcgtctacccaagtagcacgaccagcttctggttcaaccagcatagtaaggattttgctggacattggcagttcatcgaacagtgcaccgactaccagttccttctgcaagtcacggataatacgagtagagaagatagtttcgtacgcttcgctagacatggaaacggaagaagaaccgtttacagctttaacgtgagccttaccgtgttcagtttcgaatacgtccttctccatcatataagacagaagaaccagtttctcaacttcatcttcgaaagcatcctgagtgccataaagagctttagctacgctatcaccaacgaaggaacgaccttcacgagctgccaacagagacttgatttcgtcctgaagaccaacgattgtttcctgctgcttctctacagtctgtgcaaacagttctgcgctcttcttagatttttcatccagagatttaaccagatccagtgcttcttccagcttcttacgatcttcaccgacagccttagaaaccaggtcattcatacgagccaattctttttcttcctgctcttcacgcagacgcttagcttccgcagctttctgagcagcagtcagaccttccagagatttagccagatcacccagaccaagttcttccttcagcttattaatatcaatagtcatttttaaataattctccgttattctttaacgtagcctaaagctatcgcaagtttttctagttcagaaagattacgttcttgagctgggacagctttagaacttgttgcagtaaaagatttacgccattcagtgtaatcatgaccattcatactcttagctaggttaaaagtagagtcttggttacacggtacagaaactaccgagacttcgtatagttctaaatctttaataataaaaatatcagtagcttcatcccattctgcatctaggcagcggaatccaatactaaaagttttcagtacaccgtttttaattagtgagaaaatcgcagggtcggaagcttcataaacttcacattcaatctcaagtcccatttctgtaggattaagatcaatacacttaccgattggacgacgatggtcgtggccgaaaagaataatcgggtttttcatgtagttagtaagtgcatttgacgttttccatgccgaagcaggaatcacgtcaccagcgcgatctttactaattgtattagcgaatcctcggatcttaacgacaccttcggactcgctatcaatagacttaacgtaagcgtctaaatgaaccggtgctgattttaacttgttatagtcaatcgcagcatttgtcatttattagcctccagcagcagggttaacagtagctacacactcgttagaagtaatggcagtagctttactatccgttactacgactttgtaagtacctgcatcttctgcagccgcggtcgctttattgaagttagggccggtagcaccacttagtggtgaaccatctttagtccatgcatacgtgtatggtgtagtaccaccagtaaccgtaacacctagattaattgccgcgccttcttcaacagctagagttttagccagattctttgtgaaagctagagccgggacagccggagcagtagtttcgtaagcttctttgaacttattccaaaccttgcggttggtatgtgcagtggtcattccgaactctttacgtagagtagcatagtttggaacaaacttgtgtgctgcaaccgtagcaaagaagatatgagattctggtaacttctcaccaaaaatggccttcagaccatcataatcaatcattcttcatccccttcggcggaaccttgcggtctaccaccttcttgaccagatacacctgtagcagaaccagcaacgttagcaggaatacgaatcttattcatctgctcatcatctaaaggttcaaggttcagctccatacgagcttcgttaccagtcatgataccgttattaaccagagaggttaaatgtttagcctcagcttccttatctggagttaacgcaactacttccttagtatcaggagtaatcttgtaaccaaagaagaaagtaagagaactagtcagtttgttcagcataggaacgattgtcatgtagtagaacaattcgatgtttggtcgaatattagcgttattaccaccatcaatcagaacttgcggaacaccaaaagccagacagacgctcttatcgaaacgttcaatgtcgtctttaaagtctagatctttaaatgaggatatttgggagtacggttttgctttcataccaccatctagaatcaggacagtagactgacccgtactaggattataatcgagttgtaattcttcttgtttacgctcacgcaatttcttgttcaggatttcatccgtctcaagaataagaccaatcactgtaccattgtctaggaacttctctttaaagttaagcattttagaacgcttctcaagagagtcaataacagtagcaacacgagattgtccagaaatttgagagtttgtgccacacacgtaactgttatcctttataaagataatctcatctacgcgataatctatctgattattaaatataaattttttgataaacttattggcatctgcctcgacctgcataagagcagccgggacatggtaaagtgctgtgccatcccaatagatgtatgcacaaccttcaaaaagtaggtcagtgactacaagtctacggaatgtgcttatatccatgaatggattaggtcgtacatttaagagagtgtctagagtctttgccttgacgccattagcgtacgtgacaatattatattttgctccgacagtgtaagaacactcagccgcactatcaataaccatgttagcagttcggttgagaatctcaatcttactgtaggcttgacctgtggtaaaaggctttcggttagtacgatgactaactggttccatgtctcttataatacgttgacccggatttagcttttcagtaatccagctttttaaacccattataagaaccttgcgaatcctgatttagtttcagtcttgacttgtgtctctttgtgaggattctgtaacttttccttttgtttaagaacccatcccttctgcttatttgcagagaaaaggggaggttctttagtgtacaccttatgtaatagttggtgatggtggacacaaagggtaacagtgtcatctactagctcatgcctatatctttcatagaatgccgtcctatttgagaggactgtttcttcgtcagtgaaatccaactggagttctttagcaaattttttaactagtagagacactgtatggtaatgatgaagctctaattcttcttcacaaccacagatttcgcagcaagcggcttttttatattgactttttatgccgtctcgcatgagtgatattgcatcacgtttgtattttacattactcgccacagtattctcctcaactgtatgaatatagtatacataatcatgtcgaatttgtaaaggggattttaaaatgcaggaatgggataccaactgagtagtatcccatcctatacttatttatttcccacgggaaattgagtaaattccataacgcagggcgtcacaaaggtgtgaactcgcatcatgacgtggtttttcacgtgataatttttcttcaccttcttggaaatcccatttgtagttggccagtgcatgaatcagtgaggtacatgaagcatctacaatgatcttaccctgctggaagagtgcttgtaggcacgccaaaccatctaggacagatttcttagcaggtgcggaagcaatctcatgctcatatgccaagtcctggcggaactgagcagcagcggagtccacaaatatacgatcaacgttataacgatctatacaatgctggatgtaagcagcatgttgggcagtagttttctctgcctgttgatactcttccagtacgtaatagatatcagtatcgtagtgatatttgatagtaagaacagctgtagggtcgcggtaaccaacgtcaataccaagtaacgtttcgaatgcttcatcatctttaaagaagtgacgcatacctttgaggtctttaacatgctcaatagcattgaaggtgtcaaagatctgaccttcgaatacggagaagtcagcctcatattcttggcggaaatagtttttactaacagtacgacgagcttcctcgatatcgtttaggtcagcacgtggattatcacgatatgtaccatgaatagatacccaattaggcaacgtttcgttaaatcctttctcgtagaactctttgaaccagttaccaccacgaggtgtagagataaatagagctttagagtttggtttatctagggtaggacggagctgaatgtcaaacgctgcgccaccaacatcggaaatcgctgcttcgtcaaagataatgaaatcatacgaacgtccaactgcggagtcagcttgcgccgcagaagctagtttgaacagggaaccattggccagttcaatttctttatctttggcgttctcacgttcagtctgcaatccatacttcttaataagacctcgaatctgtgaccaaccaatgtttgcaagtgagtagttaggtgcaactacaagcaccttcacattgggttccagaagtttcaagaagcccaatgtgtatgcgatgaatgacttacctacacgacgtgatacacacgctgttacgaaacgatgtctaggatcttccagagcattaataattgccacctgaggggcattaggtgtaatcccctcttgagctaggatgctagagactggcagacgaaagaaacgtttgtctataccaaagtcaataacatccgtagtgttaatatacggtcttgagacctccattaccttttacctcccgttgctagcgaggtaattaagtccatgtagttctgatcaccagagccagcaataatattattctgaatattagtctgattagtaggagcacgagtagcagctcttgccttctccagctctaccatcatcttcatttcttccatcttcattttatgggctttccacagaatatccatgatatcctgatcagatcccataccagtttcttcaagttcttccagcttacgcttgataacttcatcaagaaccccaaacaacttgtcacggttgcggaatccactttccataaagatatcgttgagatagttcttaacttctccacgattcataatatccctgaatgcaatttccgacataccaagactacgggcagccatgcgtacatcgctaccgcattgtaaataagcctcgattacatccatgccttcaggggacataagatcaggtactaaaacatcatttgccattatgttaacctctgaatattaagtcttagtttgtggtattgaacccacggagtatatgaaacagacagaccgctcattggcaatgctctagaagttacccagaactctagaatattggaagcgttctttctgatataatattggaatttgtttcgaggagcaccagctgcacctccagcatatgaaatagtattagtagttagaataggtacaaaggtatttgtatgtaatactacaatttggtgagaaacaccatcacctgcatcgtaatcatacttagtcaaacgtctagcagcacctacatatgggccactacctgcaccactagcagcattgttaccaatacgctgcatgtttacgtcaccatcagtatcacatagagagttacccatccattcaatacttaggagaatcgtagaaggttcgggactaccacctaaaccaacatcaactgtgtttattagtctggtttccccatacgccataggatacagtctaccattgtctccaagaataatattattagctttattctgagtaaataattgtagaggccttacattaggactccagatatccacaccattaatagctattttattctgtggagagttaatctcgatattactgttttgtggaagtcggtataatccaatattccatggtgttgagttacctaccgtactacctgtattacttccagtaaatcctttcaaaccaccccaggcattagcaccaaagaatctgaaagcaccaccatcatccatttctgtagatgaccaggcaaacacgttactagagaagtaagtattactaatactaggagtaccggtactaacagctgccaacatttcgtagttggtatttcttaaatcaactcctttaattataaaggaatcttttgcaattttgatgtcattaccagtaaatagattttcagctgagtaaccccagtagttatcaaacgtaacattcaaccataggtattccatacgaactggagtgaatgggtagtaaacctcactaaatccagacatacgcccattggcaacatgacgttcggcaccagcagtcatgtaagcagaactggagttagccattggaatctggtaagggaaatcaagatctctatacttagtaaaagccgtattaccataggagtttggatcacccatacccgtagcacatctagcaccgcccgctctaacatacacggcgtcataaacactactagaaggcccaagtgggtgcatgtaatcagggtttactaggttctgactatcttcatagttcatgataggacggctttgagcacgtggtatccagttagtatacatataccaatcctgtgggtcacgccattggtacataatccaaccacccgccaggtcatagtaagcatcagcaacatagtcttcaccaccttcgtggtcgaatataatatgtccaccagtaccatagttaccaatctgatcccagacagcaccaccctgtttccagtaaccccattcaaggttcaagtcaaattgaatagatccagtatattgaccccagatactaatattctcataaaggttacgccatctataggtgctattcctctgaatacctgtcatctgatggtagtattctgtaccatcagcattatctcgtactactaggactggaagaattacgtttgccctgtttgctagaagatagctgaggtcagatggtaaagctccagtaaagtaaccgttacctgcgttccctaaacccacctgaaaacggcgtttaacaaacatgtggggcatatctgaatggaagatggagtttgtgttgggactgtaatgaacgttgacgtctcctccactagccctatttaaagataggactgtttttccatctgtatattttcctgcgaagaagctcataaaatctcaaaatttcacttgtcaacaagtctttatttttatataatataagtataaattaaaaaggcatccaagtaaacaaatttttttattttctggatgggtcactggtagcaaacactatgcaagaagatgataagccctttcaggagcctctaccactagaaatgaatcctagggctaaagcagttcatgatgcaattaacgaaatcatacaagatgtcatacaagatacgatggaagatgtaatgggtacatccttcatactagaagaatccggctttgatgaagtaatggatcttatcgggacagtcgttatggttcgtgcaattgctagaatatttcaaataccacaattaagggagcaagatagacatgtcagacgacaacagaagaaagaacaggcgcggagaagtgtacgaaagttggataaatagtttcggattcggaacagtcctctttcttatttttgtattgttttggttagcagctatggcggggtggctttaatggaagttgtgattattgttttactagtggttattatcctaggcatgtgtgtaatcgacaatcaccttgcgagaattgaacgtaagctgcggggggataaataatgtttgtaatggtaattgtcttcatcgtcggggtgcttgcgggtattttcgggacggctgcggcaatcaacaggcatcgcgagtatattgcggaggttcgccgggagtttgcggaaagggagcggaggttttcggagaaacgggcggagttcgagcgggagtgggcggacggatctcgggtaagtcgtcggaagtttcgcatgagtgaatcgggtgataaaccagttgacaggagaagttcatgaaagaattcgggcagtttagtataacccaagaagaacttgagaagatgggcgtcacgcaggagatgttacaagtttttcctaagtcttcggagataccagagggatttatggcgtttaacgatgctatagagtacatcaataatcttatcaaaactgatcctctgtggcaaagcgtgctcaagcagtcagcccgtaaatagcgctaaattgacttttgccaaattccataagattacacatggaggtgtgcccagggagactctagatgagaatgagtctcattaccgccccggtacttagcaagctaatagtcacggcatgttatcgtttcataccgtgactattttatttttaattgttaggcgacttttaatttatcaatgaattgttgcggagtgtaattatattctgctctttcttcgtcggtcataccttgccagcacatttctaaacgttgcgctaggaattgataatcgttatcatcatctaacgattcatcaataaaggtttcaccgatcaatgttaccccgattgataggatatcattaacggcttgagcgtccagcgttttaaatccagcacttgccgccgccgataatacacctttatgatcatcaatcatcgtaaaatcagcattagggtatagctgtttaaacagttcaaaataataagatttataaacagcgtctttgctgtgatatatttcgctaaccttatccgcttcgaaatatttatgtaaagtatcgcgggaaaatacgcgaatattactatttccgcgccctcgcaagccttgtttgcgcaaataaaaataatcgcttttagacattaagcgcgcggtacaaataatatttaaagtatttgcatcattcatacattggcgcatatattcaaccaatggcaataaggaatcttgcataattaaatcatgtttgcaggcttcgcgggaatacttaactaaatctaaattcccgttatcatcaaaacaaggcgctacgcggtggaatgaattgatgattgttccgtctaaatcccaaatcataacgcgggaaatatgcgggaaagcgcgggtaatattcatgttaacttgattcatttgttacattctccatttaagggatttagggttaattcagcattacccgcttattatatcaaagcgggtaataattaactaacctttattcactcaggccatacgctagagcatcagctataaagctaatatcttcacctgatacactggaacgaatacccgcgcaagtgtagacctttgccgataccgttgtatcatcgcagcacatagggcaaggcgcgacaactgcaaaggctagaccggatttaagagcatcaataattaccgtttccattttaacagtatcaacataaacgccacgcccttttattttgcttgattccttgccggtagcataagcaaaggtagtaacctgcaatgcttcgttaaagtttaacaaatcatcgataacgtgacctgattcaacgtgataacgctcgccattagaataaaccagaacaatagaggaagcggcgcggtcgaaaggaatatttgattgtttcatgtttataactccagattatttattaatgggatttaaatttatttaatgctcaattgcatttgatacgcggttaattcgccgttattagttacactttgatcatctaaccattccataaaatcagagtaatcattaaaagttaaaacgtcattatcgcgggtatcgactgcaataatacaacctgtatttgtcggactggctagcatataatcaaattgatatactttgccgcactccatatcatcaggcgttatatactgttttttatctagcgttttaggtaatacaacattcattttaattaaccttttattaatggcggtatatttcaaccgccgattaaatttaattatgcaaagaatttaccgtttttgaaatcaatcaaagtacgttgcccgtttgcataggtaattaaatgcgtttgcgtccagctactagcgccgacgttgtaacccatatcaagggaaccagcaacgccagcggtataaacgccgccgtaaatgctagccgtgtgagtgtgaccagtgttaaggcgtcccaactttttaaactgcttaggattgccccgactgccgttaatgccgttgtgaccatgtacgccgcattcaatgccagcgattttaaaggattggtcggtagtcaggaaaatagcgttaaattcgcagccagcaacgtttctaagcgcataatctaacacgttaaacgtttcatcacgttctccaattgcggcgtaaatcgcagcgtttagacggtggtatagttcggcgtttgcgggatcgtctttaatgttagcgttacgatcatctagccagcgtgaaagcgctagatcgtggttagattcaacaatgattgtctgactaaaatcacgctccattgattctaaaacgcgtccagtgtcgataagatcatctagaactttatcacgtccggcggcgtactgtttagccaagaatacaccacttgcgcggttatgatgattgcgggatgtaaaatcatgcacgtcatgaataaactgatacttaggcttgagaatatcaagcaaactgttttcactagcccatgacgcaacggcgcattcatcatctaatttttcggcgtgaatatcgccatattgcaagcctaaaacgtgtcctgtaatttcacggcaaccgctaggagtggcgcaaacattcaaatcatagaacattccgctttcgtccattgtttcaagctggcgaacaaaaaattccccttcgtcgtcaaattcgacaatgagagcgccgaaattatggagcgcttcggctttttgtcctgccttttgctggatgtagtttttaagcgtagccgttccggttgaatacatacggcgcacaatttcaccttttaacgctggcacactttcagcggtgattttagcgtgaccaattgccagaccttcaatatttaaagccgtggcggtttctgcgaatcctgaaagcggataatctgccgttggtaatacgttaatttcagccatgaaagcaaagcggcgattatttaaaaatacgtttttctcgcaaatatatttattaaatgcgctatcgtatttaatgccttcgttaccttctccattctggaagccgtttttattataaatgaatttacaaaccagcaattcagcgccgcaatattcagcgtatttttccagacttgctaaaaagtttttatgcgggaaagtattattttgaatcgacgttagaataaaacggcgaccggatttaacttcccattgttcaacggtactagaaacaattcccgccgcttcggggcgatcatcatttttaatcgccttttcagctttcgccgctttcggtttcgctggcttatttgcttccagccagtcacaaatcgcggttgaatgtttcggcgtatcgtaaacagcttttgaaatatcgtcgcaaacttccaatttagtagcgcgtaaacgcttaccgtaaaaattgaaatcagcggcaagtttaacgatctgggcttgtttttctgcggaaatattcataactaattcaactccattaaagggatttaaagattaatactggcaatattgccaaatataacgccttgcctgaagtgaggacaatttaaaaggcgttataatttgcaacatttaattaatcggcattaaactagaacaaaagccaaatacaatgccaattgtcaaaaagataatagacaagtatttttgaatgttcgcgtttttgcggaaattatttgcggcgtaaacgttatttattccaattattgccagaattgaccgcgtataattcagaataaaagcggcggcaataataaataaacctaaaataaacgcttcactaggataaaagatcaatttattctccttttagggatagcggggaatattccccgctaattagaatttattcacctgcggcctgttttacttcctccgctacgccgagcaattgcgctacagcgtccagcgtttcaagtttagcactttcaaggcttgccagatcatcggcatctttcacaatgccgctatcaatggcgtgtttagcaatgacgcgcacatagtgagctttacgaacgctagacccgccgccaactttacgcggtttatcgcttttctggtacgcttttgcgcttgtcagtttagagcgtacagaaacaggacttgcagcgccaacggcggcggcaatttcttttaagccgtcactattcgcaaactcaatcccgcttttagcgaccatttcagaatacatagaaacagccttttcggtgttttcttcgttccaagaaaattttgcggttttttcggttttaacgttagacataatatattactccatttaagttttaattaagggattatggctagaattagccgctatatattctttattcagaatatataacgaaaactctatattatagttttcaatttaaagcccgtcatattatcggggcgcgattgtatataatacgctcgcctttgttcttacattgtttgccaatttctcgttattggttcgtgttagctcataattgccgctcaaagcatgatattttaggtttaaatattaattatgctacggcttgccatttatcatctttttggatgattttaacagcatcgccagaatttaaacgaacattaaaagctgttttaccgcttttagttttttccgtttcggcgtataccgcattaatagtatcccacggatcaagcgccgccccttgcaatttttcaattttgcccgtttcctcattcagtttagtaatgaatggaacgaaaacggattgaccaattttaggggaaataatgttttgcatttttaatactccggtttattggggattattccacaataccgatttgatgttttaaatcggtattagattataatccgctaggagttagcctaaacattaccgtttttccatattgttaaagagcgttactgcttactacggggaacatcttaaaacctatcggctagagtgtcaagcgtttattttgttcttttcgtgaatctcttttagattaatcatcatgttatcccaaatcatcggtaaaccttgttgcataccgcgtttataggacttgaaacggcgtttcatttctggctgcattatttctaaaagcatatttgcttttttatttaatgggctagctggtttcgcactaatcactaaagcgttttttgatttgatcattatcgtcgattccttatattatataagtttaccgccgataggctttaagatgttccctaatttttaaagagcgcggcggtaaactttcccgccgttgtagtccgttgccgtcctacgagataaataataggttattccccaaattggcgcaagcgtatttttgtaaagaaacgtaaagaaaaacagcgtccagcgacggcctaaaattaaatgaaacggacgcgcgaataacacacaaataaccagtttagcaagtaattttttcatttatttctgctcttgcctacttgacaaaatctaaaatcctcgtggtgaggagatcggcatagtaccaatgcacttgcctagcttttcctcaaaggcgcttagaatcgcttacagagcgttttagaccctgttaataacttatacaaagagcaaaaatgaaatttaatgagttatccacttgacttttcaaaaaagtattttctgctgttattttgcattgacaaataagttaagctatgtattggttagctagcagactaacaatcgctaggatgataatcacgctggtggattgtaacggttgaaatcattagcagactactaatcacggaaaatcctattagccaactaactatttcatattatataatatacttataaattaaagagaaataataacaatatgaaactatcggtcaaatgagaatcactagcatttaagttatccacagagatattcacagcacaaaatgatttgacacgataggaggcatttacaggacttatccacagacttataaacaggttatcctactgtataaatatacagggtagaaaggtagcagtaacaaccacaatcaaatttaagcggcctaaaacgctctacacggcgttttctcactgctacccttattataataaagccttgtgtacgcttacagagagctagaaatagaaaacgcgcgattagcacaaaaacaagcgttaggcaatgaaaataaaaaggtaaaataaacgttgcccctagcgaacaaatatctatatcattcactcaccgattaacgagggagacaaagaaatgtctactgtaagaattgcagtacccgcaaacgctactattattaaaggcggtttgcgcaatctgttagatggtagtagcgcggcaagcgtacaacataccgctaacattgttgaaaaagtacactccggcgttttggattatgaggacgggctttattcaattgatagctttactcaattgctagatccgactcgggcgcttgtactttataaccgtgattatcacattttccgtaacagtcggggaagtgacgttgattttatcatcgttggcttttgccctagtaacgatagttacattgcgcgactatataacgtgcaagaaaaagagcaggtaactgctactaaagtaaatagtatcaagttcgataatatcgaaacgttactatctagcatttggggcgatctttccaccagctttaagcggtcgaatgatgaagccatagcaacaacgggcgttgtagtatttgaacgcgctagtggtaacatgctgattcctaacgattattttgaggatggtagtaacgcctcaaacgttgcaaacgctggatttacattaaaaccagttgacaacgtaacaaaacaggctgtaaactctcaaacttcaagcgcaaatgcgcaaactactgaaaataaaggaaatattatgtctaaagtatcttctatcgttgccgctaataaatccgccgttgttaacgctgctaaactggaagcgggtaaaattgcactgactcaaatcacaaaagtggcggcgaaaaaagcaccgtttatgattaaaggttatattgatacgccgattggtcgcgtagtgatcgctaacctgttaagcgtagcggttgaccagtacgccccaactaacgcgaaagctaaagcggtagcaggcgcggcaatggaagcggcgatgttagaaatggtacaatcttttaacatcgctgaaatgatcgatgaaatggtaaaaggcattgacatttccacctttaccactaacaccgaaagcgagtaataataactagcggggattatttccccgctttcccttttagttaggagactaattaatgtcaaagtatggcgacgttgtaaccggatcaacaattgatcatccgatcattgcactagtgtactgttacactaatacgcatggtgaacaatgggcaagcgttgattatttccccgctggcgatattgaaacgccgttgcatgaaatggcaatggaaaacgcttccagttttagcaaccatgaaatttgccagaattgtgatgagtctgctaatgattgcgagtgtgatgattccaatctggtagaaaatccagatgtaggcgcaacggcgtaccgctggcaattcaccaaaagttatcaatttgttaacggcggtcacggtgaggatgaagtatataaagccttgctagaattggggattgtccagcgttttgataatgaattgcatgtttatcaaagggcgctagaaaacgcttgctatttcccgaaagaaaacagggcgctagaatatcagcgttttgagcaggtgataagatctgaaagtgagctttacggcgatgcaataatcagatatatgtaaatgtaaagttttgtaaaggtcgccttaatcggcggccttttttgttataatgcctttacaccatttacaggagggcgaaagatgagcattaccaccgcgtttcatatcatggctggcgtgatcgctttcgcttgcctgttacctttaatttttaccctgattctaggagactaatattatgttgaaaaatgtttcgcttgcccgttccaaaggttttaagctggtggatgttaacacgtttgagcgtccagattgtaaaatcgaatatgtagcacgcaacaaaaacgctttccgtgttacagaaaagaaatttgacaagcgcggcaatttgatagccgaaacggttaaacactttgctactttttacgctgcttttcgtggggtattatgagatccttatatattgctctagcgtttgctaccattggcgttgtttgctcattcgccgcatttgttttaaaaatgtatctgatattttcccagctctaggaggttgacaaatggtaatttatgaaggcaaccgctttatagctaattgccgtccggcattgttagcaaactatttaaatcagctttcccctgtttataaaggcgtggttaacatctatgaaggaaaagcacattataagattaatgccgttgtcgctcgcgagcttgcctttcagtttcttacttttaactcatgcgatattcaggttatgggtgaacctttgattgcagaaaatgaaaatgagtttattgacattttccgcaaagtatgcacagagcgcctgataatgaaaggcgcatatattcaatcaaccgctgatagtattgaaacagcgtttcggaaaattgcgtatgaatagctggtggcgtaaaacgcaatcccataaatctaataataccgctgggaaacattcccagcgtttacgatttgggaatggctttgcaatgttaataataatcattctcattctaggagcaatggcgctatgagcaataaaattgttataaccaaaactacaaccacggttgatactttctttgtgcctgatacgctggagaataggcaactagccgaaagaggggattatgataaactgatttatgataacgatggttactatcaacatttggtagactcctacggcgaaagcgaaaagatcacgcatcgactaccagactaataataacggggcgcaactatcggccccgccttttctgcctgcaaacaaatttccccttattaaaatacctcctccaaaattaaaccgcttagaacgcgtttgagagcgttttagacctatattagagttattcactacataggaatactgtatatttatacagtagaataacctgtggataagtctgttgagaacgcctcaaaatcgctaggattttgtcaagtcaaatcgtgctgttgataaacctgtggataacttaaatagcagcgtttctcacttccctttctaaatgcaaatcattctcattcacattcaactctataaatgataaccattctcattccaatttctaaacgcgaatcattctcattcgcattcaacttctcaaatgcgaatcgttctcattatcattcgcatttcggcaagcagggcatttttcatttgccctgcgcttttgtgcaaatccgacatttgcccccatggattacgtgctggcgtgtatgtgcgaatccgacaatttttggtagtgtgcaaatccgacccgaaaatattttatagtgtgcgaatccgacaatgaattttcctaaaaactccagcaatcacgagcgtggctcgattcctgtggaattaactagaatatgtgcaaaaccgacatgggtttatttgtgcgaatccgacaagattttttgtgacttcgatgagagggtgtgtgattgtgtgagtttgtgggagagttgatgcaacgagagaaaataagaggagaaacggaaggggcagcggtggtggcgtgaaacgccttgtttgctgcgtttttggggataatgtgggatgttttgggaagatttgagattggtcgagataaagtaaaattttattagttaaatggggcaaaatcgcttgacaagtgaaaattcctgtggctctaaaaactcaggcaattatgggccttcggcccgaaataatgctgctattttcagtgttcctaaaaactttggagactcctatcaatgtgcaaatccgaccataaatttctagaaatgtagtgtgcaaatccgatgagaaattccagaaatgtgttttcaaaaaatgtctcctagaaataaccgccctccctataaccgccctgtattaaccgcctattactagagtttctaggaacaatgaaaaccgcctgagttgacgagggttttcctagaaacttaggagtctagaagaaagtgttgtgccatcctagcagatgagcggcaacaggtgtatcatcttgaacgttaatttatctattcaacagtattagtttttatataagtataagatcccccagggttctcatatagagctttgcccctgccagaaggtctcgtgatgtttctagtaatctttattaaattacctgttgacttgtcctgtcgctccgtatcctacgctacaagtcagtaatttaagattcctgaaccaccacaccttctgtgtggcaactctaaatggttaattttattaactcatagagttatgataacatacattaatctatctgtcaacgagagtttttattgttgtctcggtacaggtattgtgcaccgagacatgcagataattacagtaactcttggtatgctttctggtacgcctcagtatccgtaggtgtatcttttgcaattgcaattaattcatctgttatctgaatattcgtgttataacgtgagtggaactcgtcaggaatttctagatatctattaatgaatgccgcggcaagcggtgaagctatacccatctctagaacccatccaacttgtttctcatacttaacataaggagattctgtttgagtagaagttttggtttccttgacttctttagttggtaggattggattttcataacgtgcttcttcaggaatagcagatctgcgttctttataaatataagtttctagatcagatgctttagatcctgaatacactgcaaagacacttgctttaccttgtgatgctctaattggtagataacaatttgggtagcttctcaatgcatcatgaaaaggacttccagaatattgataacgatctccatataaatcatcaatattcattcgttcatcttcgaagatatggaatgcgctaaatgatggtaacgtgaaatattctgtctctagcgcacgaattaagaagcgatgtgcatatgcactgatcttaataactgtgtagggtttctccccttctttaagggcattacccttagatgtaacttgataacgttttccaaagaactctactagacgcttctcatttaaagataatgtagaatataaacgtccattcaaccctagcaaggtgtcaaacataaatgctagtttatctttttcttcttgggttagttcagggaacggcaggatcttagcattgggaatgttatttgtttccttagcttttcctttaccagcattttgtctcagtttgtccttgaaattatatgtactcattgtatttcctttttaaggtcagatgacctgctttttattttaaagcctccgtagaggcttatgtgttgattaattaaatcctttactattattagtcaagtcaacaagagcttccataactgcatcagcaaagctgtcatttttactagatggtgtactcagatgaatagtataagagttcctagaaactccagcatccgctggtgctacgcttcgcgtatcagattcaagagcttcctgagtatgtcttaactgtatagaagggctgtaatcttctccaatcttataaggtgtggaagtttcgataacaccaccacatttaacactgtgcatatccgacattaatcttttatcagaatttgtcattgctgtgatatacccagaacctaaagacggtagctgcatactgttagtactaggacgatttacctcagtcttcacgagtttgtatccagcatcgattagagcattaatgaggttgtcagctgggatacgtgccgtgccaaagatcttacgagcatcaatgagtttgctttcgaaatctttacaaccttgcagatcagtgtgcaaaaagtacatcttcatggatttgaactgaaccgttgcatttaagtctttaaagctgtagtcccctgtatctaattcatggtctgctacgattttaatagattgttgtgtaaacattatttattctccagtttgtctaacagcttgcgagctgctatactatattgtttaagttcacgattgagaatctggttctcactaattaactctagattcttggtattgagactactacagcaacatatcaaacctagaattgccacgagagacgctactaatataacgagaaataatacttccattatttaatccccatgtattttttcaggtaaacgatgaagtcttccgctttatgctcttggctaccttgagccacaaataattttagagcctcacgctgttgtttaagattagtgacttcgctacgcaacttcacattatcatcaataatctgattggcttcacgagtcttatgcacagcggtgttaatggcaaagactaatgcgattgctaggataattaatacatattccatcagttactccagattagctgccagctcttatcgaacgtggctgctctattaattaattctcccatagagacattattatcatctatagcttcctgtacaaactctttaccaaaatcatttagtaaatattctgtattatttatagtaatcttatacagggttggaactagtggatgttggtgattaagtggaatatcattaacaattacctcattccttccccacgtcgtcttgaacaatttgtgggacaggagagctaaggggtttgaccaaactacatactccatctttctttaactcctgttttaacttttgatctttattataccaaattatgtgttcaccgtcaactacaaatttgtggagacatgcgggtacggtgtacacaccatattctgtaaggcgtgtcacaactttgtgtgcacataatcggcaaccatgtccttctaagtgagaacgtgcagtctgcaagaaatatccatcatgatctggacaataaatctcaacctgctgttgcatagttctatacttaactctctcatacccgaagaacttaccatgagcttcgatagctcttctaatgaatataaggtttagtgcttcttgttgaaagtctggatgtaactgtctgatcttagttctattaatagatccatcagactttgtgaacttattatatgggaatgctagagcttcctcataaagtaattcatttattttatcacgcatagtatacacaaaaggccagaacaattaagtcctggcctctagaattagtggagtttcttgccttgcaaagctaagccagcggtttcaattaatgattctgtaacttcgcgagatactgaatactcattaattgcatgacgacgtttaaaagcataggcattaacaaccagatctacagcaccaagaacatcttgaacggtgacttcttcaccattatcaatctcttcctgagtaatttcaattagttgcccaactgccattaaaaggccaataacatctgcggcttcagcagctaccattggatcagcatggtctgtagtaagatcgaaagcatgagttactatatctcgaccttctatagtgccttcctcaatccgcttctccaattgcttcatctgctctagaactggatttttcttttgagtcatgatatagattccttgtatcagttgggaggaacgagctttgctgtttaggaggatgttgttttgcaatccaattaagaatcagaacacggctaggaacgatatcggtgttataccagaagtcatgaacccaatgtcgtgcgtcttcaaacttaccgaattggtatgctttcttgaacaatccaaaaccgaaacaatcaggtgcgaaatctacttcacgataagtaattaccttagaacctgtgagatcttgaatcgccgcgttaatttctgtatgagaatatttcgattcatggaacgtattgaagaagcgataattgaagcgtccattcgtttcgacaaataactggataaacagatcattgaactggccatcaaaccagtagttttgtaatctttgtagtgctgtcatttgcgaactccatttattgctgcgataaagccttcatacataaaaggtaaaacttgcgaaacatggaaatcttgaattgtccagccagcttcttgatacataatattaatgattgcacagcttaacatgaaagctggcaggattataaagtaatcccatattgccttttgcaattgagggttataaaaattgatcatctgtttttaagtctccttattactttggcttgctccacgataatgaaaacggcaaccactaaaccgaagactaggattgccgtaacagttgatagttcaatcacgggaggcgccatttgtaatgggctgtccaaagggtttctgcttcatcgtcgtggtgcataaccatagaagctggggaataactatccgcatactctttacggatcatttcacgctcttcgccagtctcaatatctttaacaatcactttcagatgaagtggaggcagttcagacaatggtcgccagaaatcttctaatgtaccttccagctttccacgaatacgagtgagaacttcggtagtttgggtatctgtttgaatgaaaccgtcggtaacaaaacccaagaactcgtgcagtaaggttgcttctaaatgattaagcttcatctttcaggatatcctcgattaggtcagaagattgttggatttcgtcgataatgcgttttacattggtcttagtgatcttacctgcgatcatcgtcaaggctagagcaataataagaactggaaccggaataataaatagtgctactttcgcaacattcttaatagaccaagtatggtatttttgaaccaaaactgcaataactacaaggtacatcgctaagagaaacataatcatttcttaatctccgtgatgatctgggaacgaaggattttaggaggcaatttcgtattccctgctattgattctatatttgtgagcttttcttttaaaagatctgaacgtctttgcgcgtcctcgatatctttttcagcagctacatacttttcccaaagaccgttattggtaagcttcatagcttccatgtttttgctagcattaataatgccaattataccaccgattgctgctattgttgtagttactagcaatccaattagaatttccgttatcatttatctgttactccattactacacttaatgtaggggcttgtcattctgtagaacttaatttttactaaggatgcatcgcttgctctacagaagcgtctgccctcttcaatctgaagtttcgcctcagcgatatcatccagtttatatgcatcaataacttctacaccagaatacttcgaaagaccctcgtctaggttagcttgataacgtatatcatatgcttctgggttagtatattcaattgctgagaaggataaaggtgcatcctctaccttatcacgttggtagagcataaaatcagtaacaccgagcgtgatagctacagaaactagggcattcagccctagtacaagcaagaattttccgttagtcattatttcttacctttcagttgtttaacttcacgctcaaaggaagctgcacgacgttcagcagttgcctgatgctctttcgcaaaacgtgcttcttgtttagcaagattgaatgccatagcgttcttattcagagaatcatacatcttcttcattgccggaatggacatcttcatcagctgaccttccagaccctgcatatccagcaggatagccagtacgtttgccatttcgtttttagtcatgttttccatgtttgaatcctctctcattaatttatgaagctattatacagcattttgaagcatcaagcaagtgaatttttaaattaattaccagtcattcacaaaaccggagaactcagaagcaaataccgcttcaaacttttccgcaatctcaggatgatttttgcagatcagctcgatgcatttctcaggttccataccctcttcctcaggatcaccgtaatacttgtcccaaagatcatcaggaatgatacgttcagctaggtcttggaagataactaattgataacggtgaacatcgtccgaatcaagaatttttaccaattcttcatctacatcactgcgataatcagccatcaatagagcattacaagcgaaacattcccacatcatcaaacgctcagaaatcggattagatttatcttgaacgtaagattggaagataactttgaaagtagctttgacttgctcaaatttatctgccgctgcggttaagagtgctttatcaatcttttgcattttgattccttctcatcaatttataaagtaattatacagaaaactaagcgttttagcaactgaatttttataataaaatacctattcctacgccaagtaagaaagaaacagcaacaattattgctgctgctacaactatatcacgagtcattccatcaaaatcaaacatcatatactcccattgctaaatctccagcatcaatttcagatacaacaccagttactggatcaacaatcttgttccacgtctgaaacttaccagatacgatatcttctaaggaaataggtgtcttactcatctcaaaggagacgttgatatagcgttggtcacgtacagaattggtgtgcacgtgtccgtggatgttcagcttaccacgaagttcatccgggtggataggtgcgtgggatagccagaactttttgccaccaccactttgcttgtctagagcctgaacatcatcgtaaatgtctactagatcacgaatgcgaataccctgacgttcagcatcgtggttgcccataataagctggttaggcacattatggataaccgacttcaatttggccaatccttcacgccctacggcaatatctcctaccagcacaagttttgtacgcttgccaatgtgcttagacaaggtatctaggatatattcatcgtgctctttcatattcttaaaccacggacggaaacgtagtgttccaggatggtctaagtgcaaatccgaccagaatttaacacgcattattcattcctcgcaaattctttatgtaattgttctctaaggatctctagttctttagcggcatcctcagccttttcatggtacttagtgtcgtatcttttatctctgaaacgaaccctgcctacgtatttattgatacgtttatccagatagacacctttaaatcctgaagtattggaactttttataccaacattccaagtattttgagcactatcagcagctctaaggttactccagacattatttgttcttattgtatccttatgatctactttagcaggtaaataaccttccatatacaggaaggccatcctatgcgccccatgttttataccatcaattgttagattaatgtatcctgtggttttgcataaagtgcctgcttctttacctgcaaatctggtattccatgttttattagcatttggattaggtttccactgaaacttccctgtttcaggatcatagattagtctactcttcaggtactcctgagaaatgtcagccattaaagaaccttctgagcatagttattccagccttggcagtaggagctgatacctcttagcaggaagatctcttcatgaatctcatgatgttcctttgcatcagcataacctttgtctaattgctcttgacgagcttcctcataggctacacgattctcaatcattttccagacttcttcatactctggccaatcgtgctctactacaactgtcttgagatcctctttccctcgttgtgctcgactaaaccacaatttggataagatatgttccaaagtagtaaagttactttgagtaatatgccctaattctagggctttctcaatgtcagatagctttataactacataacgttcttctcgttccattatagaatcctctgtacaccgcagctatcatctttgtcagtggtaaatgtcatgatcttaccggcttcatcgttaacctgcgcaaccgtcaactgcccgttgaaaacaccgccagtatcgagataaacacggttagtgtacagaatcgggtaagggataccagtatggccatggaatacaaagtccacaccctcaacttctggcacttttacagtcagttcatctttaaatcctgcgtaacgctggaagtatggatgttccgcaccatttttagccagatggaacccaatttcctggatcacatcacgatcccacaggtatggctcaatatagtgagctggatgatcatgggggtcatttttagatgcctcaatatgtgcaataatgtcatcccaattcggggtatgtacatcaaaaccagcgtctttgtactggaaaggaacaccagcgtgaactacaccataacgcttaccacgatgttctacagtcatgaatactggcattttagcagccatatctgctgcgatacctttaatagtatcagtatccagatcattcatagcccacataccaccgttgtacatccagttggcataatcaccaccaatcataaactgatcatggttgccacgaacgctacggaagcgtgggttatataggaatttggctagaacctgtaagttctgtgggccacggtcaataagatcacctacgccaacaacatagtcgcgtttaggtttgtagcctgccagtttcagggcatcttccagcatatcattacagccgtggatatcccctacgaagaacaggttaacgtcgtctggtactaccagagtttcatgcagattaaattcttttttcattatcgagtcatccaattagtgtgtttttcagcttctgtatcgtttggctcaaagacaacgtgacagtcaaccgcttcccagaaagattcacggataatagcattttgctctgcaatatccagttcttcccactcttccattgtttctaggtcagtatcaacttcggtatcagccccaaccaagcccaaagtaacaacaatagtaacgcgaccttcacgttcttcgggataagcctcagcatactcccaagcagcttgttcaacatagtattcttgttccttctcaggtagggacttatacttttcttctgtgatacccatttcgacagcgcgagtaccacagaccacgttgttatgtattataagatatgcgtaattcaatgtgatactcctctcatcaatttatacatcaatttatacatatattataacaaaatttttagcagaaagcaagtaataaaaacccagatcagctaagatctgggttggatttattaatcttctggattatcttccaggaaggttttgatggcctcgtgcatagtttctttacgaagctgacgtccaatcagaatgtgattggcttctacacgaccattcggcagacgatctgcgagaactactacaggaacctgacgaacgccaaatttctgcatcagctctgtgttgtccgtttctttatggacttccaggctatagtcattgactactttatcaaatacaggttcaaacatcttgcacgggttgcaggtagatcctttcagtagatatactaatttactcatgtttattaatggcctccaaaaatgccttcatcacttttacagttgctgtgctcagatctaaagcaacacctaagcactcggttacagcagcctgataaggggcttttagcctgccttccggtacttgtactttcttataagttttcttcttgactttatccagcatcgtttcaagaacattgagaggcaacttctgaccttcaatattcacgccaagctcttccattagcatggtatttaagtcaatacgagtaagtttcttgccattgctagacatacgcacacctgcctttttctcaagttttgcacgctctggtgaatcgaggtcacgtaatgcgatgttcaattcatacggagccatattgtaatggttagccatctgagtatagtaacgatctgacattgtgaactcctctgattcaatttatacaaatattatataaaaatttcggcaggaagtcaactacttttttatcttaatgtgcttgatgtgggaatctcttcctaactaaatacatagttattggataaatcgaatacataagtataggggagaaaagagtgaaataagccgtaactcccccagctaacattaacggtattaacgctagagtaagggccataagaatcataccgaatgagacagccagggctacggaaatgcaattttctaattccatccataaccaacaatatttcgtattcctctggcaattgcacttgcaaacgccgaatgtgcccataattatatactctagcccgtgaatgactctttttaacagatcattttgggtaactagtgcgacaacagttagaattatcattaacacgaaaactactagactaagtttccagatacctagcagcatcatagtgaatagttctgcaaacatggctttctcctatcttcaagttattaaagccccctttgctttaaaaggcgggacaagcccgccttaacttactatttaaaccaattccacatgaccaccgtcataggtaccacgatcgatttcatcatgataatcccctgaggcattccagtcagcaccaaaacgaagtttgacaccaagttcttttccagcttgttcaaaagccttcttaactgcccaaaatgcttctagatctttccagtcaatcttaccattaatatatggtgcgaaatcgagggcatctccagtcacatgcttactcttgctaggatctttcaggaatgaagtaccattagcaatgttttgggcactttgtgctactgtacgaataccttgtacgattgtgaagtcatacggagatagttctaaagccctacgagctactttttgtagctcaggcttaacagtagctaattgtttttcgctatttttaccaaatttaaaactcatattgatctacctaatgatctctgctgtggtgaacagagctttgttaagtactcgttaaattgttccgagtcggcattatctacgggtttatccttccaagcaacaccaatatatccagcatagatgttgttaaggttgaaatacggacacgtgtaaatataattaaatgttacgtttttaaacgaagggatatttgcccccatgtatttattaatctttacagttaaatccgaagcgtagttaaaaccttctaggtgacgtctatacatctcagacgtcttatttactgctttatcggccaagtcagccctatctaattgcgcattgctttcccatgcaataatgttggaataatcattgatagcatcgggtttatacttgactacaaaaacagcatccgcacccgtctgggagaaaagaaccatgctcttttctctcgctacattaggaaagttatctatcctttgggtttgaacatcctgtaaaaccgcagacgtggagaaagtctttaagaacgacatcacctcgctagtattactaacaaataagaaaataatgacagcaactaagatagttagcagacgtttaagaagcgatgctggatctttcgcttcttggagcagtaccgttaatagttgtagaaacttttccacttgtaacctcctctaaccattaccattatactaattctagaggaaaattacaacgtgtttttaaagatcacttctggagcacaaaattttgtcgttgtcaagaagaattttaggcaaaagaaaagccagagtcgttaaactctggcttaaaactacttacacttctccatgttcctcagggtgaggacattgagctttgctgaattgctcctcgcggtacgctgccaatttctcaatacgcttattgatttccttgctgttgagatagatattcttgttctcttttaccatatcctcgatttcttcgatggagaagaacgggaagtagatatcgagcatcatatcttctacaaactgattgtaagattcataggctttcttgatttcttgacccttctcacagaatccgccagagaacgtatgtcccataagcgtagagtgtggatgaacaacccaaccgtggcaagacaggaagattgtgcagtaagcagaagcactaggaccgagcaggtgtccaataaccgttccacgacagttagcgatcaggttagatagctgtgcagcagtatcaacataaccaccaggcccattaatcatcagattaatgacatctccttcattagcctgcaccaggatcatagataagtcacgatactcatctgctggcccgagttcctcgtcaaagaaaaaggtatactcgttagattggtgaacggagtggaacaggttagtcttttcttctttcttattagtcatagtgatccttaattatccaattagtggttctagctctaagtcacagaagttatacacttctagtttaaggttatccataccgatgaacggattcaccagttcatgggttatgtatttagctgggatacctttttcagacggatgatctgtcttaatagtgtattcctgctccgctggtactacatttatcaacaaagaatccatatctagatgattggtttctcggattaactctccttcattagggaatctcacatctgtaactattgcgacgtctgggtcgtctttagcgatggattgctccagaattatgagccaaatgcgttcatgcaccagctgccttcctaactcagtacctacaagctgtagcatctttcttggggagataaacacactgtagagtgcatcatcttcttgcccaatcaattgctgaggatcaaggtattttccttcaaaaatcggccaaatgtacgagaagtcctcaaacttatcaataccgtacttaaaccatacgtctctagctcgctccaactgagattgtgtgaccgtaaaccattggtcaatctcttttcccctgcgctctcccagaaactctggagttaccccgaggattacggatgcaagttcgtaaacgggtttagcaaaactgtaacgacgggataaacacgttggatacgtgtcattacaccagtcaatcattaattttgcaacggtatcttttcccgcaccagcctcaccatgtaaaccgactaatactgacattaatctttcctatttgtaatgggtggatagtaaactaagcaacgtttttcttgtaaatcttggcggtagaagcaaaccatactagtcagccgtgaaatgtaagagtaaactgcttcctcgcattttgctttagcattccaatctttgtatggtacaacaactactacgccatcttcgccatttgtagctaatttcttttcgaatttgaaatcaaaactacacggctgaagtcctttaggccagtcaacatgagcttgctttaactcatgtgaaggctctggttttatttcttctgcacagcctgtgattgtgattgcggctgcgagcagtactccaagtttccagttaaacatgctaatctttcctcgaactccttactctgctttttagcaattaatgtaaccaatccaggctttgcagctataatgtcttgacgactaagtgctttatcaagctgactaattttcttgtctagatctgcttgggaaacattattcattgtgaaatactgattcatacgagtttcacgaagctcactctcagctttcacattattaagagaagtctctagggacgtaatctttttagtagctaccgcaagatcacctgctagagtttcaaccttatttactaagtgataagcaccgaatccgatgcctatcgcaagaccagctcccaggatatacattttattatcccaaactaagtctacaaaccatttccacatcagcctgtactcgcaaactcaccgtggagttctttgagtttggtatctcgccattctatggcctcttccaaactcttaagtgttttcgaaacttgcttaccatgtttagtgattcttacttggtaagtcccatttgtttttctatgaatatttttaacgcctaaatggttatcgcttcttactttttgattacaagcgttatcagatcttgtagcaggtcttagattctcaaacctatcattagttgagtctttatccttatgatcaactatttctggccattctccagtatgccatgcatagattaatctatgtgtacctatagctagagaaccattatacagctcaactactctatgtcctgtactttgtctagatcctgctactgttcctgcgaatatcttattaaagtgttcgtccccttccctgggtttccagataagattaccatcatctcggtaatcgaacattcttcttagctcttccttactgatcatcttttcatattcctaaaagaagtaacagtatcaaatccatgtgcggctaagcgatccttatcggaagtggtaatagtatctggttcaccagttcctaatacgccccagatatattgctcgatcatctggtgtaaacgatataagttactttcaatttcctgccacggaataccggactgatggaaacgaatgttggtctgaataacgaagttgcgaatatcatcgttttcgttcttcttaatacccttcacataagcaattggtactcgtagttcagataagatacgttctgcttttggttttgcttcaatcagcatatctcgcatggattctctaacattacctcgactcttgtctagtaagtaagagcgagcatgtaatcccatttcttccattttgtcgaatactgcatcgaggctaaacgttttaaagctaaattctggatgccagcagtataactcatgtaaccaataaacctcaccagcaacgaataatggatttacacgatattcgaagtcaccacggaaggacatggaaccttcacgaaatacttgacgatcatggacgatgttcttttctacatcttcagttacttttaccagaatctcgtctgatttacgttcccaaacgcgatcgggatcaaataaactgttctgtaaatcataaacatcattgaactttgaaatgattctcataaattatccttttgcctcaatctataaacatattatacaagactttggggcatctgtgcaactgaaattttattacaaaaatagcccagtcgcaaaagtgcaggctgggctttgtcattatttattttgctagtaagttgatttgagatcaatcttctttagtactcaattctctagcacgacgtagcgatccagcggttctccatagtttgatgtcggcaactgtttctttatacggagcgactgtagtaccaatcggcccaaggaatagtagaccaaagaagccaataaagcgcatgtatcgtaaacattgcttcggggtcatttccataacagcttttcgttcatcttcactagaaaaagattcagctttatcttctagtcgtaggtattttacaaaccactcagcggagtattcatccagatgacgaattaatgcaattgcataaccagctccgatcaatagccatgcaacaaaaataattaaaagaaaagtcatgttagctcctaagttagaattgaggtcagcgaccaactcaccacttttgcctgtcggggggcacgactcccctccgtaacgttagtaggtgacactaactcggtcctacgcgagttctttacttcccaaagtattcggctttgagctgtttcattttgcgagttttacggtagaatccataaagagctacaggcccaaatagtgtatcgaatataataaatattgctagtattgctttatatgttttatctcttcctagctgatttagtatatctggagaagttcgtttcatatgttctagcaatacgtctttatttttagcaacaaatacatcatcaataaagctataaattgcaataactgcaccaataataaaccaaagagcaaacggagaaacaatcatttaatatccttttcgtcaaagtaaatttcagtgaaatatggaacttgtcccattatcattgtgtcaccgaatttttgcattagatcccaaagaggcatcttgataaatccatcagtaattactggatcagtgtattctgcaatacgtttatctgcgaaaacaatagcagcgtctgaattatgctcataagtataagctctccagaattcagtatgctctctacgaagatactccagaactggttccgttgctggaatcctcgcataactgtttaagtttatttctttcacgttcttctctcctgcgtttacgttcggccatcatgtgtgctgctacaacttcatgatagtggtcattaatattgtcttttggtaagaaatgcttaatagtttctatttgacatacaactcggtaaagatgtttgtttggtatagttaacttcataccagtaatgaatccagaaaatcctggtacactacacatcggctcaccagttacagaaccatcaggttgaagtataacctcaatcgagatccctagcttcatactataaagctgacagccttcccctttaccaaatctagcccagactacgaaatcttcatcaatctgatcttggatttcatccacagcagcctgaactctaggatctaaattactcatcttcaccttcaaagtcgcagttataacgacaagtaaacgaatcggaattgttagaacgttgagtagtgatttcaccacgtttgctaacagtaacagcaggagtagagaagtttttattagtatagatttctactttaccattatgttctttaacatcacgtactttaccatactcggtaataatgccattctgttgaactttaacattaccatttttcatagaaactttggtagacgccagggaacagaaactaactgcggaaaccatcagtgcaataataaacttattcatcagggtcttcctcattacagtcacggcatacatcataatcgttgtaagaatgttcgtgtgcttcacaccaccagccacactcatcacacaggaagatctcagtcttttcaatggcttggcctagtaattcgtcagcttcgtcatgtgtgatcttcaggctacaaacatcagcaacacgttgaacaatcagactccctactttgtggtaggacatgcaggttccttgtgcatcatgctcaaggacatggacagcgcagtctaagcgatttttcatttcaaagccctctctatcaatttatgtaactattataacaaataaagagggttttagcaaatgaattatttacgaaattagtcgtagatccaccaaatgcctttcttacgaaggtcgtgatctcgattgtagtcgtaattttctggatctttcattacacgatgtaactcacggcgatttccttgtcgaaccattttgttagagtgccatttaacattctgattgatagaatcccaccaatgaccatctttcttttcgttattcaggatgccttcctgaatctctgcatctacttcatcccaagacatagcccatgcttcattagagcgaactcggtagtatttccactgtttaccatcacgatcagtgtaaacatatggaatacgcacgttggtgctatgaaagttgtaagtacaacggtgtttgtcacgccagtaacgatttccagattgtttgcgataagtacggctcatattttctccattaagtctgtgaattaacttaatgtgggcgaacttcgaaatataacatcagtaatctccgttatcgttgtatactaccccagcgctaggaagttcttctactgtcacatcttcaaactctatagaagatctatggtttctagccagttcgattgcttcttcctcagtttccgcaacaacaatagccgtaccacctaaccatagtccacggtagttcactttaaaaattttcattttgaaaatcctgtgtatataagaaaaccccaactacctattcaatagccggggtttattatttaattaaagatcaggacgctcatcctctactgcaataccttcgccccaccctacaaaaccatcaaattcgtcttgcatttgtctaagctccgaaattttcattcctgacttactattaccatagtatttatggggattaccacacatccaacaagaacaaatacaaggtgtagtagtaataatacctaaccgtttaggactttcttcatgagggaagactgtccagtacttcttgcgattgttctttacacgttgacgatgatgacgtcttaatgctctgtccactaagttctcctaaaacttcggagataaatggagtttgctcgactaccttgcgtagttgggagaaatcgtatccaaaccccattagatcgcctgagtaaatgtacgactaataacgtcgttctgttgttcacgcgtcagtgcattaaatcgaacagcatagccagagacacgaatggtcaactgagggtatttttcaggatgtttctgtgcatccaaaagctgatcacgacttaatacattgacatttaggtgctgaccgccttcgatttgaggaactacttcaacatctacgatgcggaaggcttcaggatcaaagtgaggtgtgataccttctagatcttcaactagaactttctgtttaagttcactgtctttagagtatagctgaatgatctgattatcatgaacaagattaattacgccggatttaagattttgatatgctttcattagatctccctgatgttagaaattggctcagctttttgataacccagaagcaagataaaaactgggaggcaggcttgcttttctcttaatcactagctactgttggagtgctagcattccggtgagattgatggtctcgattaagaagaaaagcacaggagctttgattttaacgttgcggtcctcctggtctgttgcaactacgtgatcgctcacgctaagacaatggctatctaaagtcttagcttctacatttatactcttggatagcatagagttgcggtctacttcccgccgtcacgcccggccatttatagaatgtggactctcttctcagcaagttctggcactgcggcctgatcttctgtttggtagttagtagtggaatcgaaccactctagtcgctccgtatgaaggaggtgcataaccgatctgccaactaactattatgtggtactccgacttgggatcgaaccaagatttgacgattatcggtcgcctgttctaacctgttgaactatcagagcattttgttacatcatctcgtccagataagaagtatactggtatttagcttctccagttttatctacctcaacttctgtccgtggtacttttcgcactaaaccatgaatcatcttataattaatagatttagatggttcgtgatcttttggaaacacctgcttaaccgtaaccactttaaagccttcacgtggtgtcaacacaacaacttgatcaccttctttaattttccaagactcaggaaattcataggtataacgctgaccaccagtttgaaatactacagaaagataacgtttcatttggtttccctctcattaatttatataaatattataacaagaaataggagagaaggcaaatgaatttttaaatttggtgctcccaccaggaatcgaacccggttcagatgcttacaaggcaactgcatcgccagcaatgctttaggagcaataaacccgtcatttcaacgggatttctttttcgtacacaggagacttatcagacattactgtcattgccaactgctgtagaaattcgaaggttaattttaaacgttcttcgcctaattctacctcaacgtatttcttttgtttatcaacttttaactttaggttatcagccattatgtagtacagtactggaggtagctaatgttggactacataaaagctgtgctttccagtctaggttaaactgttcacggaactcttcatacgtttcttcaggatgaaagctataaccttgcttttcatcatttaataaaaccgaaccatcttcttgctcataggctcgatatgtttcaccaataatcaaaacgcgtctattaggatttttattacgaaactcaaaaacgtgcataacgtttccttatttggtgcgggatacgagagtcgaactcgtgtctactggttggaagccagttattctagccactgaactaatcacgcatttgtttggcaggagaaggaggaattgaacctaccactagtggagtcaaaggccactgtgcgaaccactacactattctccaattgtttggctgggatgccacggatcgaacgtggaaccttcggagtcagaggccgacgatctgccaattgatctacatcccaataattcttactctacaggaaccgttgcgattggctcaggtccttcaagacgttttccttcatgatcgacccggataataccacaaccttcacagattacgacagcaccataaccttctttaacttcggcttctgtaatcagaccagataagtcaccagtatctttgccccacatatcaatggaacactctttgcagaaatcagccattattaacccctaggacaagttgtagaaacgatagtgcgttcagaaatccaaccaccagtataatcaccgttaactttatagtcaaccagggtaccatgaccgcgttttgcagtaacaggtagaattttagtgccaccataaccatctttgacagttacagtacaatctagtgatgggccgatagtacatccagttaaagccagagcagcaatcaatactaagtatttcatgttgttatccttgttaagttaattggtgcatcctcagggaatcgaaccccgatcgtaaagttcgtagctttacattctttccgttgaaataaggacgcaatatttggggtggctagtggaattcgaatccacataggcctgattcacaatcaggatcattaaccatttatgatatagccacaattaaagtatctactgctaaagactttaattgtggcggctctccgaaactcatcacactaacaactagttgattacttctggattctcgcccagaaaattctctagaaaggtgcgccgttactctttgagccattgatgtatcaaggaacagaaggacttgaaccttcacgagatagaccatttatctcagcctcgttttcgggtatcttatgaggagtggatgttcctcttacgccctttgggaagccccgtctaccgattccggcatactccaagaattatttaaaacttatagccttcaggaaccttatctttaacaccatcatacttagcttgaatgtagtagtctggtacatgatcttttggcagattcttgttagtatcatgaaccgcagctctagcctcttcttcagaatcaaacccgcgataccagatttcaccaccccagccacgttcactttcggtatacttaacaatatgtttcataaggttttccttattagttggcggaagcacatggagtcgaaccatcaccatatcactacagcgggctagttttcaagactagttgcataccactacgcccgtacttccaattgtttggcggaagaagagagattcgaactctcaagcctgctttcacaagtcagccactttccaagcggttttcgtcacctaatcgatttgctcttccattttatttaagatgatgcctctactacgccaggcagttagccccgctgggattcgaacccattaaaacagtgtttccaacagcagtaggtttctctgaacatcaaatttggtagggatggagggagtcgaacccacacccgaagactagaacctaaatctagcgcgtctgccaatttcgccacatccccatttgtttggtggagtcactcagaattgaactgagttccactgcttgcaaggcagtaagtttaaccaaataacctatgaccccaaatttggtggagaataacggaatcgaaccgttctgttgtcctcggtgcaagcgaggtgtccactccatgcagacccattccccaaattctttaagtttactaaggctattagctcggtgtgcgtactgctctcagacattagccagtagagaacagccgctcttcacaaacccgatacactattcagttgccgctgaatctagtggactaatctagaacttcttgcaaattatccccccgccattagaggtatagttgcaagtgtgctttctggcagccagtcctaggtcgagccaataccttagtgaactttgatgaggatttctcctcatcaatttatataaatattataacaagaaattaagcactttgcaattgagtttttgcaatttcttggatatgccttacatctttaacgaatagcatatcagaacttcctgagtgcatactctgcatgaaaactccatcatctggtgcatcttctttcagggtgattccattccaaaactcggcaaaaccaggtgttacgacacctcgacttgcctcaaatatatcaccttctgtgatggtttgtccagtgttcagagaagcataaggctgttctaaatctacatccttatagaactcttccagaccttgttccatatcccagcccttcatgagggcatactgcatagttacatggctgaagaacgcttgaacgttaatggaaagtttcattgtaattccttgttaagtaaggtggtactcggtgatagaatcgaactatcgcaaccgccgtgtaaagacggggttctcccattaaactaaccgagtaaaagacttccgattaagaacgcttcaaataggaactcacaaagtcctgctaagaacattccaatagtaaagtcagcagaaaacacgttgtactgcttgactttttgtttcattaagtaaaaccagattatcatctaattttcctttaagttggtagaccgcctgggacttgaacccagaaccttccgattaaaagtcggatgctgctaaaccaattgagctagcgatctatttaatatggataaacttctttaatagagtaaacttctaagtagcgatgattaataccaaattcagccattacttcattttcatctttaccgtaatgagctaaagtatactttgaacgatctttgctagaacgtcgatcacttactactaatcgaaatagtttcatttcgtatcctctattaaactggaagcgggtgtaggaatcgaacctacctctttctagcttatgagactagcgatctctaccagagatctaacccgcgattgtttggtctccgtgggaggatttgaacccccgaccctatcgccccaaacgaaacgctctggccaaactgagctacacggagaatattctttgttaactcactttataaaatatattatacagtgaattgagctaaatagcaactacatttttaataaatttacttattaggtaagtcaccgagctatcaactcatgctagcgagaaagtttgcgagactttctttaaatactagaacacacccgccgatgtgtcggacttacttaataagtaaactttagatctttcgggaaattgccaccctaagacgatgccaccactagagccgttataggcaatctatctctagctgtctgccccaatgctatcggtctacccgtaggtacgttttaaccggagggctttagcgaatcaaacggccggaaatcatcgccttgtttcttcacatagctgtggaatttcaccacaatctaaggaatttggtgtggagagacaggagtcgaacctgctatgttcacaatgacgggtggtgtacaagctccggagttacccaccttccgatccacatcgaaccctcaacttctggttggcaaccaaaaattataccttttaactacgaacgcataataagtcaatctaggtagggcttgaacctactatcacttgtgcggatttacgagaaccattctttcactcgaatcgaacgagcttctaccctcggcaagctggtgtcccctctccaccacgctagaatgtttaattgggttaccacattccgaatcgaacggaacttaagcctcctatcttgatagatcctttggagggttctatctacggcaagggcattacttggtacacccactaggacttgaacctagaaccctccgcttaagaggcggtagctctaaccaattgagctatggatgtataatttggcgcgaccgatgggattcgaacccacattccctcccgtgacaggggagtaccattaccaagccagccccgatcgcataatttgtttactcacctttgagtttagatatagcttcctcaacttcttttaaagcctcacgatgacggttgaggttgtgaagttcatctagaaggtcagccttctggctctctaccaaccgttcacgaaccttaatattattcttaatattatcacgatcagcttctagtcgagcaattgcatgagttgtcatatctatttcctcagttttagtgaaaatggagcctgttttcgggaatcgaacccctcatctactaaagatttgcaactctctagcaaacgtcctctattaagctaaccatagcatggttactcgggtaattactccctttcttccatagagacttcaggcagaatatggcgggccgtgtaggattcgaacctacgttgtctttcgacatggattaacagtccaccgccaaaccgcttggctaacgacccataaatttggacgaccgcatgagattcgaactcacataaggaggttttgcaggcctccgcctaagccattcagccaacggtcgtattaatctgtttcacgcatatcatcgtgtccgcaagtaggacattcccaatggcattcgtcatgttccccacactgagaacactcgtacatttgtggctctttaacatcttctagattgacgaactctagatcatcaaagttgccgagggttcgagcatagaagccgtcacctgcatcataacctgatttaccacaatcacacattttaaattcacgtaaacgtgtaaagatatgttcagagccacaacacttaaatttaactaactttttcatttgcttctccagttcaatttatgtaataattatacagaactttaaggatttaagcaactacatttttcagaaatttgatgcctttcttacgcttcttataccaccacgttttagagttttgtcggttatgaacgcttgagatctttgcctcattaaagtgcttcaaaaccatataatcagctcctagttgctcaagtggaatgtactccccactagaatcataaacataaggctgttgactagctctatagtgatatactttattaatccggcgtttaagcaaaggactagtacagtatataaagaagttttcaggatgcatcagcatctccttcaaattggtgcaccctgttcgtatcgaacgaacctctcaagctcttcaggcaagcgctaatccatctcagctaaaggtgcaaatattggcaaacctactaggactcgaacctagaccgtacggttttggagaccgacatgctgtccagtaacactctaggaatgcagaatttagtaattttctagtttggcttctagctctatgactagtttatcagcttgttctagttgagcttctactgtaccaagctctgtaacggctttattggcaagagcataaagttcaccaacatagctttcgttccacgcgtaatcaggaatactatcatgaagacggcggagtagttctcttaattgaacagagccttgcataagaatctcctaagtaattggcgtcctgtgcggggatcgaacccgcaaaccctaccttgaaagggtagtgactttaccagtttgtctaacaggacattaaatttggtgtgggaagatggagtcgaaccacccgagacccttccgagtcggcagatttacagtctgcttcgctacctctacgatactattcccacatatttggatgaaaagtaagtcggttaaactcaaggtggaatatttcaggctatcctgactttacccctcaaagcaactcgcttagttacttctcattcagatatgttttccaaattagataactattatatcaagatttatggcactgagcaagtcaaattttaaagaacttgctcagtgctgtatcagttaatcgaagtcgggagtgactttcaaggtgaacggaagttcgaagacttcttcaccttcatcactaacggtaattacacgaccttctagtcgaaccatagtgatttcgatatccgctttagcatctggagccataccagcttcaatacatttagctttgatttcaggcagaagttctacattgtagaaatagagccactcaatctcaccttcccagccaccccaggatttacatactgagctttcgataccagttgcgctaacacgttttgacattctgtttcctctcatcaacttatataactattatagcagaaatcttaagtaaaaagcaagtacatttttaaaatttctgcttggaggagttaaactccggcttcttctgccagatcaagtccagctaacgtgagtgctagcgttgcagcagcatactcttccgcaccggtttctttagcttgggtgagaatagctgtaaactgtgcctgaaaatctgcaacagcttcggtaagacctgcttcagctactacacctttaatcagcaaacgctgtgtggttacttctggattagccatgttttttctccattttcatttttaatagtttgcaaatgaagtcaatatcttcatctgtgtgtaattctttatcctcaagagtagccttgaagttcttcgccagctccatcaaaagggtttctcttgatcttcgggctggtggaggcggtctctgatacatatcagtttcctttatttggtaggggtggtgggattcgaacccacaaaacccgaattttaagtccggtacctatgccaattcgattacacccccatgtaatctttagagttcataaccctgaatatatcgagcaaagccagtaatttcaaactgaattgcccaggctacttccatatgctcaatcttgtcgaaccgagcatcagactgctctaggaaatagcgagaaataatagggaactcaatatcgaagtcctctttatccattccgtaatagaagttttcagagatattacgaacttcacggaagaagtcctcaatctgaaaatccatcagaggatacgtgtattcctctttgctatcatccgtttggaagaagcggaaatgtacgagacaagaaccaataaggttaactgccggagtagtataaatgtccatcttagcctcgctcaatatctagagaaataccacatttagggtcaataccagagccattacagtgcgtacacacataagtgttaaaccaagtatctcctggttccgcatcattccattcacctgccccgaaacacttaggacaagcacattcttctagctcttgcttgagttcttggaacttagacatatcgtctcctagttaattggtggctcctctcgggtatgatccgagaacctgtcccttatgaggggaatgctctaacctgattgagctaaggaaccatgaatttggaggaagataccagactcgaactggtacaccgtgtctccacagctactggttgtttagcaaacaactcccttacctttagggttaatcttccgaatttatgaatatattatacagaaaatttcggcaattagcaagtgaaattttctgtataatagccctcgcttagagggctataactactttacttgttaactcgtacaaagtatcctttataggctcccatgatagagttacccaggaatactagccacattgctaggattgcataagatgcacccgtagattgggcagttacaagccaaatgtatacagtaccaatattaatggcgatccagatcagccactgttcagcgtactgcttaaccataagccacatagcaactacactaccaaccgcagtaaatgcgtccagcattgggaatggatcagcggtagtagccaggaaactaccgtaacctaatgtacctactgctaaaatccctagagtcagcagagcttgtgctttagtcagaaccttagtcggaacatctggcagattacttggtttattcttatgccagaggtacattccataaaactgcataggaacgtaatacatcaggtttagtgctgcgttaccataaagatctgcatttaaagctgtaataccataggtcagaacacccaccaatccccaaacatagttagaaacgcgcccctttgcaaccagaatcacacaaacaacgttggtgattgccgtagcccaatctaacgctgtaccattatagttagccaaactaatgaaggctactgcaatgaacagccacagatattccagaggtttccagtttttgaagtcatttacaagatagttagtcatattagatagctcccgcgtcaacatgatgaattagccagtctacagcatttacagcttcgtccatacgaactttgtagtctggtgagtcaatataaacagtacgtccctctgggaattggttagggaactcctccttcatctgctcaaatagttctgaagtaatagaacgatcagagttaatacgtaaaccatcatctacccacttcacagtaggcgctagaacaataactaaatcgtagtgttcttctttcgcaatagccgtaaccacaggattcttacgatgttcgtaaagtctatggtagaactcagtaatgaaagcattggtgtctacaaacatgatcttatttgcagtgcgctctgcttcaaactctagctctttgtgcctgaatgctatctttgtgtaatcgtcactagtcaacagactttcgttgccgactagatcaacttcacaatatgtacgaccatattcctcgacccatgaagtattatataacttcgcaagatactttgttaaagttgtcttgccggagctttccgtaccaataacaactaccttacgcacgtagtctttacgaaccacgctaggtagaaactcccaatacttcatcagattctcacgaatcatggtagcagagattggtacacgagtacgttcagagtctaccacatagtgctgcatgtgcggtaaatactttttatattcttcctcataccctagctcgctagagaagatggtgtagttgcgatccatgatatcttctgtattatagaagccccactctcgcatactttggtcgattaactcacaataccctttccaaccgttcgggtactcaggaacatcatcttcaactacgcttttaatgataacatgatcaatatccgcataggtttgctcaagccaacgtactcgattcttcaactgcaatacttcttgatcacgtgggttttgtcgatccagccagcgattatcatggcttacgataacaataacacgttcacacatagttgcagcaacgttaataaggttgatatgaccacgagttaatggcgcgaatttaccaattactagaccagtcttaatcatatttgcttcctctctcaaatttataaatatattatacagagaatttggcattcaagcaattgaattttcaaactttttgcaggaaaatagtagggcacttggggtagcaggtaagtgggtagaccccaaaattgttaccccaacagaaatccgggggcaatttttaaagaccccttgacatttttgttggggtagtgtaaagtatatgttatggatgagtgatcaaagagacacacattttctatatactaggaggtgtcaaaaaatgacagaagaagcaactaagaaacctgagaccgttagtgaagtcgcagcagaactgagacgtcatgaggaatcagacaaacataagtgggagaaggtcaaagcctacgaaaagaaacatcgtgatcatgaagattatgatgaagatgatgatgaagatgacgaccatgagggctgtcataaacataggaaacataaaatgcaagaaccagtaaacgtattcactagcggcttcccaggtctgatgggtggttacccagcagtagcaaatggcgctttcggcggtgaaggtatgggcctattcggagctatcctgatcggtgctctattaacaggcggattcggtggtttcggtggtttcggacgtggtgctggtgttgccgctgagggaactgctgtggacgctatcctatctaaccaggatactgcaagtattctagctgcaatcaacactgctcgtactgaagcaaatcagggtactggtgctgttctgagcgctgttaatggtgtaggtgctgctcaagcttctagcactcaacagattctaactactgtgtatggtactggtgctaacctgtccaaccagatctgtcaggaaactcgtaacgttattcagggtcagttcgatctttctcgccagatggatcaagctttcgctgctaaccagatcgctcgtgcacaggacaagtttgactctgctcagatcgctttccagcagtctcttcagaccaacaaccagttcgccgctgttcaggctcagatgtgtgctaaccagaacgctctggaacgtcagattgctgagtgctgctgtgaacttcagactgcgatcgctggtgtaactactgcgcgtatccaggacgaactgaacgaatgccgtctacgtgaagcaatcgctgcaggtagcggtgcaaacggtcaggtaatcaaccagatcgctgtaagcctgggtgcaattactcagactctagcagctctacaggctaaagtaccagcctaatctttaaggggaggagcccattatgagtaaatatggttttgtgaacaacggatttaatcaaccaatgggctcccagcagcccattccgggtctggataacccttatctacaacagttgcaacagcgtttagcagaagcgcaacagatgcagcaacaactccagcaaaaccctggaagtgtgagccctatgcaaatgatgcagcaaatgagcgggcagtcgcaaatgcctcaacaaatgcagcaacaggtgcctcagcagcaagttcagcaacaaacccaacaaccgcaggtttctgcggaaggacaggcagtactagccctttttgaagacttcgcaaagacagaggacgggaaacagcttgtatcacttatgggtaagtttaatagcttctgccaaagccaagttgcaaaagctcaaaatgggggtaataactcctaaggagaaattatgtgttgcagaaaatctgtttcgtgctgcccaatgcctgtagcacgttgttgctctccagcaatgtttacacaaataccggtgttcaatccgtttgcctttaagcctactcttatcctgccccctagagtagattttcagtcaagattggtctcccgtatgggtggttgctgtaccccgagagtatggttctaaggaaccaagtaataaaaaaaaaaaaagcccctagtcgaaagacttaggggcttttctttttccttaaatacagaaaagcccgcgctctcggaggaaacgcgggcttacatcaagtgttacgtgtggctattacttattacgcatgtccatgatcatctgaccatcgtaaccagtaccgacaacagtctgaggaacaccaccttggtatttttcagcacgaagcatttcaacttccagctgtttccaacgaatcatctcaggagtaatggtacgttgcagagcggcgttagcttcagcttctttcttagctgcgtacagtttagcgtctgcatcacgttcgttagcaattgcttggttgttacgagcttcacgatcggcttctgcttgtttaactttctgctgagcttcttgttctacacgagccagttcagctttagcagcgttaacttgttcttcacgaactttggtattctgtacctgttccatgattactggtggcagagtaatgtcctgaaggaatacttgttttacagtgtaaccataaggacgtgcatattcttcaacttcttgctggatagcggtttgcagttgagcctgaatcttagcatcaaacagatcttgtgcttttggcacagacttaccaaattcacgaatagtagacagcatcttctcttcaacgtatttgttcagagcttgatcctgagtacctgcgttaacacggttaatcggagccttagaaccatcaaactgcaacataacagtaatgtcaacagtggatttaaacttatcctggctaggaacttgcagtttatccagtttcatggaaatatctttcgtactaaaagtatcaaaagaagcaaaggggttaacaatgtggaagcctggaagtacagggttcgggttaactttacctaagaaggtctgagtcttaacagtaccatcctgaactacggtgtacgagttaagagctagaaccagagcagctacaccagctacagcaccgataccccaacgtttgatagagcggattactttctgttcagaagtcagttctttagtgtttttagtaaacatatatttccttgttaattacagttaataaaattggccgaggtgacaggattcgaacctgcataaaggaatttagaagactcctgcctatcccttagactacaccccgaagaatgattacttgatgattttgtttaacttggtttggctttctacagcagctttagcagatttctccgcacgtctagcggctattcgagctttagagtctacgagcagttcttcatacttcgtgtttacaaactcacgaatctctttgtagaaacgttgctcactcatgtactggttagcatctgcatcataacagcgcaaatagaagtaatcactaggctgtcctttcaaagtacgttctaggatttggggacgataacgattaagtacgtctttcgcctttttaacttcatccgtctcttcgcctagttgtgttagatgatacaaacgagtattatcaatataatctagagcaacactaaagtactctccagtacgaagatcgtaaccagtaatttcactcattttctcttgagcttcttctagggttaaacgctcggagaagtgtacaacatgaagaatatgagggcaacacatttcttggtgatcaaagacacaagttgttccaagattcataagttattccttttgttaggtatctttaaaagctctcgcaagaactcttaaagatacccggcggtaggtagggtcagccccctcagattaagctcttcagccctgccgtcagacaatatcttccagtttaagtcaaggtgacttcgtggttatgtactccgtatgtggaatactcggttagacttaggtcatgactcccagtctactgctgctcctcaacaggaattatcgcgaattacctgtactattgcgcaccattagtgacatctctcatgtcagcgtttcccactctcatagttacgcggtctggtaaaatcgcacctccgattttcgatgcgaagttagctgaggcatatatcaggtaggggtagctcagcaagcatcccagtcctttgtggtttagctatttcgacctaacctgctacttgcggtagtgcgaagcctgtccgcctgtcatagtatgtactctagcagcgagtgcttatccggtataagcccgagttatccgattctttccgaccgtaggattcgaacctacatcttccaccagttacggtttgatattaccatttatactaggacggcagtgttatcacataagtcagtttcggcaccccacatatactaactatctctagcaaactcaccgtggagttctttgcgcagagtaattaagtattcattagcatcctctggtgttttaaagccagatttagcgtatttctttcctttacaatagatttgtgctctccagttactcccgtgtttatatacacctttataaccagaagtattatcttcccttaatcctacattgctattgttctcacaataattagctggtctaaggttatcaatcttattgttcagcttgttggtatctttgtgttctactatctcaggctgatagccatagtgtaagataaagcacaatatatgaactaaatacctttcaccattgaatctagtagttagataccctcctactaaggttttacattccctttcagagttaactagttttctatataatattccacttaaaggatcatacctaaaagttttggaaagtacatctcttgtaggataatcttttcttttcatgaatctattatatcaacttttgaagtatttagcaaatcaatttttaattaaattcgccagcaatctgagcagccattcgaccgtcgtaacggcccgggaactcttctttgattgccttcatcagggttcctttattaataccagggttgagtttaacgagttccgcaaagtatttacgaatctcagtctcagtgagctggctaggctggtattcctgtagcatagaatacaggagttgttcgtagtctacatcagtaggaaccttagtcccaacgtcgattgcacgctgttttgcagtttctaaagccttaacttgagctttaagatatgctacaaactgctcacgagtcacaacgtctttatcaatacgctgcaaatcaccaatcatagtctggagattgagtgctcgttctttttcaccgtggatacgtgctacactaagcagaccacgcagcgtcattagaatattttcgcccattatttcgtttccattgcttgattaaaagatttttcagtcataaccgcagagactttagcgaagtcaaacttactagggtttgatgtaatatcagaaatcttagcagttttaactgttttagtagtacgaataccacgggtattaacaccaataattacaatagatttcatctttcgctttcctctcattaaattatgaaagtattatatagaaatttaaggttttaagcaatcgaatttttaagtttttgagacaggaggtttgtagaacgtgtgtccctgaatcttcgttgttttcttaaatttctttgtccagtacggtttatctttgccactatggaagtataatgctccatacgttggatcatgtggtaaatcaacgtagtatatcactctagctaaattcttagcaacttgccaagcctcatcggttttatcaacttttggtctcttagatacccaagagaactggttagactgatatactactttacagtaggaatcagggaatttaccggagttcacacggtttttagtaacctgtgcgactgcgatcataccctttgtgccctcacctcgtgcttcgaagtagatattttttgcaatgcaatcaatctgctttgagtcgtaggtagcatgactattgaagctaaaggctagggcagcagttagtagcaaagctgccttcatcttttatttactccacccaatcgtattcaatacggtttgggttctcttgatacccgttgtctaagagatcattacgcatgttctctttgcctacagggtttgaggttactaacaccactttcttgggtctctgaccaaattctaagagtaaacgaagaatttgataaccttccataccgtctacagccagatcgttatccatataaacgaaatgaccagtggtatcggttgtattcagaaactcaacagcggcttcgggggttcgaatgataatatccattccattcaggttacgaacatcatcaatcagaatatggaaaatcataatagcctcgtctcatcaatttaaaaatatattatacagaagttatagcgttttcgcaaatacatttttagattgagagactagcaaaccgataaacagcctagaggcgccacaggccatatcttatgagccatgtacctttgacctagggtttgaatcatcaacgaatactttgcatcttttagctttagaagtttagaagtttgagtgcttttaacttttcagctttcatacttgagcgttgatctttgaagttgtgttggtactaccaacgacctttgtttttacgtgtcagattaagagtctgatgtaataaacataatctccaatagattatactttatagtatggtcagcggtcttatttaacctcgtatttcaaccgctgctgcgaggtaagatgcttgggctttcgtctaccgatttgctagccttttaattcattactctacttcgataaaagtagaggcgttggactcagacagaacaaagtcaacgttagttgcaaagtcctggtagtcttcgtcatgctgcttgatcaacgcttccagacccagaggatcgatcaggaatggagtgtgcttcagttccagcaggttgatctgcattttgatttcatcttcggaagtcttcttgtcacgggtggacatgttatcctgaagacgctcgtacttagcatcaaattgagctttctgagtattgaacttaacagttgcagcgtggaactgcttacgcatgttagccaatagctgtgccttgagttccatagaacgcttggcttcgatagcttccgctacggtcattttatgagaaccgatttcaacaatcgtttctgcgttgctttggatcagggcagctttgatgcgatcgcgctgagacatcatatccagcagagactggaagtcattcgcaatacgagtagacagagcctctacttcaattgcagcaccaacaacaacttggttgtggtctttaccttcgccaaccgcaaccagaagctgttgttcagtggctttacggattttagcttccagagacttaatggttgccagagcacgagttttagacatacgagtagtcattatttcttccttatatgaagtttgagatttgaatttgttttcaaagcggtctattacagaccgattgccagcagagtgcgcagaacagtatcagaactgttatcaattttcggattagcgcggttcagcacgttaaagattttctggataccagactgacgttcagccatacgacgcagacccagattacgaatagctttcttaccatttttacgagtgtttttagatactggcattgtattttccttttgtttgttttctcaaatttatgaatatattatacagaattttggagctgaaagcaaatcaaattttgattttttcgatcatgcgtgcaacgcagtaactttcaactaacgcatcgaatgctgggtcatgtttaactggatagattccataacgaatggtgtccatcttttccattttagctttagcccagctagcaccttcggcctccagttctttgtagttatggcctgcttgcatccacagattacggaaagaacgaacgttacctagattccagaatttccacggaacgactgcttcattagttccggcgtggaacgtattagcagagtagatagtcatatcaaactctgggccattgccgtaatatagagcattttcgtctaggaacaattccatcatgttcttagtcatgaaataagcattgtaattagaacctagttcattagtgcaatgatgtttaccctcacggaatgcaatgagttttgacttacgattagttaatgcctctacaatatgacatgctgaagtactgagtctggcttgttccatccagaaagccaaggtagatgcagtaactttagcacctgagttaagttggtcttgaacatctagagttacgaagaccagatcagggtctttgtcaatcccgtgcatggctacgaaagcgaatgacggcattgcaatatgggttgttccacagttatctggagttcctagggattcaatgtccagcataccaaatggttttactttcataacttatcctttattgtgtagaaaactaacaaagagtggtctctttgttagactcccactgcttggggtctttcaagggaatttcttcctcttcaaacaggtctgtcccattttcattaacatcccagttttcttccataatttcttctaaaagctcatgtttagaaagacgagtataatctctcgcagacttgtgagtgctagcacggttaaaatcattctttgcaacgaagttacgcatagtttctccaaatgagaggggctttcgccccctagtatatcagagataagtcctacagtagtgctctagggcagcctgagcttctccaggagttacaaagtaaccttcactaaactgttgggcttcatcttcatattcataccaagtaaaggtacggttgtttatggcctcggaatcgtctgataacctgaactctagtttccagatattggtgaattctgtccgataagcccttaccgctccatcgttgaacaatcgttggagcatcccagacataatacgtgagttattatctctcatattacttgcccagcagtttaaggatattttccttaatagtttgagcagatttttcgctcttattggtttcagccaatttcagagcaagttcttcctgctgtttctggatatcagcagcggttttctgatcagcatcaatacgagcttgaagttcatcagtgatcgtggtaaaggaagcaacgatttcagtaacggaacgtggtttcttagagaacataaaatatccttagttagaaagagagttagtatatggggctttcgccccatcaatcattacttcgctttacgcttacgagccggtttagcggatttacgatcagaagcaccagtgaacttgatgccaatgccgtagcacagagcgcgaacgttgtcacggctatactctacaccgaagatattcggtttaaccgaaccgaactgaccacgggattcacgcattacatcagccattggcttacgcttctggttgactgccttttcatactccttcggagacatatctttgcgagcaaagagttcagcgccaccgttgaagctcagagttactggtacagacttgtgaccttcgcccggaacgaatacaacatgcttagcagttgcgcgagtggagttcttagccttcggcttgtgacgaactgtcagtggagctgtcagagcagcttgagcctgcgtatcagttggatgcttacgcagatgacgttccagacgagctttacgattagcttcggtctgcgggaaagtcttaactgctggagctgcctgagtttttgcgtttttctgcttagccattatttgttttcctttttgttgatcaatttatgaaatatattatacgagattttgaagcgtttagcaaatgaattttttaaaaattacttgccgatcatcttagcttgttcttcatcagaaacgtactgatatgcgcctttgttatacgccggagcagtacacatcttcttacgctcaatttcttcttgagctttacgttcacgttctgccagttcctcgtctagataaactaaacgttgttcaggaggtggcggaagacgcgtttctggttctccgatattagcctttcttatctgacgcggagattgtgcacgttttctcaagggtttaaaacctaatgaatttgagttataaattcgcataaagccctcctcactttcaatacgaatattatactaaaatcgagggctttaagcaattgaatttttaaattattaaccaaacttctcttcaaattcctgttcggcaataactgtattgcagagagcatctactgcttcgttaccactaataccagaatgtcctttaaccttaacaaatgttggattagtattatggtatttaatgtataattgagtaagttcgaaggcttctttccaaagatctaggttgagaggagtctctccatcacctttcttccagcctttcttctgccaagaccacatccaactttccataccattcttacagtatgtagaatccgtatagataataactggacggctatctttcttagtagaccaacgaaggacttcaacgattgctgtgagttccatttcgttattagtggttttcttgctaaaaccagatttagagcctaaacggtcatcattatcattaaaaacaatgaaaccccaagcgcctaaaccaggattgcctttacatgcaccatctgtatatacgtggaaaaccgacattatttactccaatcaatttcaagccaaaaaccttcgcgctgctcatacttagcgtctactacatagcctagtttagtgagtcgttgcataacgctgtttctggcgttttctgagtattcagttaatccctgaatatggcaattaaattctttttctttgattgctttgtcaatctctacagcaataagagattctagattaatcacttcctgtttaataacagcaatagtgttttgctttgcttctaaagcagataaaagaatagacattatttttcgccttctgtgataaccctagtcgccggaggaattggcggcataggagggatacgtgggtgacctctctgtgcttcatttggtgctttaggcggttcaggtctaattgcctttaattccttatctagaaattgttctatcgcccgttctacaaaatgatcgaaaggtaaatgataatactgagacagagctaagaacctacgttcttgactgtgtgttaaataaactttctttttaaagagtcccatagttgtctccgatttataaaatatattatatttgaatttcactcaataggcaaatgaaatttaaatataatagccccgaagggctatttaagttagactgtgaatgggtaagcaatagctggatgatgttgatagtctacaacatcgaaatcatctttatttacccaggtcagcacgtcatccagagttttaatgtctggattaataatcagatgaggtggttcaaaaggttcacgatcgaactgtttgtgttctattagaacttcatactgattctcatagatgtgaagattcacgattttttggcgagcgatcccaggtttatatccggtgatttgagccatgattgcaagcaaagcatagcattgaaccatgttaaacacctgacctagcaggaagtcattagacctttggaatgagttcaagtataacgtatcacctagaatagagaattggtgggtgtgcatacaaggacgcaagcaacccttcgagaactcccctggattccagaaagttagaatttctccacgatcatcaataccccttttcagattatggtagatcttggataactggtcaaacataagaccatcagagtttgtccaacgacgtccttggacaccatagactcgtcccatatcatcctcgcctttgcgatatgggttatccaaccatgcaaggttttcatttgcattagcattccatgtattaaccccgatagcacggaattgtgctgcagagtcataaccacgtagatagccaatcatttccattattgcttgttttgcaaatgccttacgagtagtaataagaggaaattcattggcccccacattaaaagtgaaatctgcatcaataatagtgaggcaacgtactcctgttctaggattagttacccactgaccttcttcgagaatacgttttcctgtttcaatatattgtttcatttaaacgttaccagctcctgtagaaagaaaagggttttatccgcattctcccctgatgcatactccattctggttgccatcgagttagccatagtaatatgtggatgcaagtgtacatcagctgataatggtgttgctgatgcgattgtcgaaacatatgccatatctaggtgatttttagcatacatttctaggagcaaagctgctccacccaatactactgttacttcttccttaaagaattcaggcaaagtatacccaatgctagtaattcgggtaggacatccaatagtttccggtaaaggcttattggcattggcatagataaatagatcagaatcccctaatatccgcttttgaatcgtttcaggaaaacctaaccacgtacctgcaccaataatgatattatctggagctagggaatctagtgtggcataaaatatatctagttcctctttgaaggaaccccaggggagtttaccattgaggccgaattcccctttcggcccagttgcatagattgctgctatcattagaacatgccctcaaattcattacctaggtctttcaaggtatcagttgaagtctcagttacctgacctacacgataagctgcaccaatctgaatttcctgtggagcaggttgcagagaggtagtatctagccagttcatgatccacggaatcggattcttggtaattacaggcagattgctcggccattctacgccaatgtgcataaatgcgttacgtcctacgaagtaaaggtattcttccagaagttctgcgttcagtccaatcagactacggcctttaaagataaagtgaccccagttgatctcagtttgcagagttttcagaagctgtgctggtgctttagccagagcttcatcaatcagatcttggtcaaactgctggaacatgatctggataactgctttggacatctgagtatgcagggcttcatcttttgcgatcaattgcaggtttttagcaataccttgtaggatatcattttctgctagagcaaaggtacacgcgaaagatgcgtagaactgcattgcctctagcccatagattgcaaagtaagcatctaacagtttagcctgagtttcgcgtttaacttcagggaactcagtttctggataagtattatccccacgatgatcacgtactgcgatgaagtactggcctaactgatacagttcatcaaatagctctacagaatctgcgatacgtgcgaatgcttcttggttcttggtaacagaatcgataaattctgctggatcagtcagaacgttacggataatgttactataggcacggctgtgcagatcttcgaagtagctccactgcttcatcataccttccaattctggacggcttacgagtggcataattgctgcttctggcgcacgactaataaatgagtcggtctgagtctgccatgctaaattcaggagagtaatttcctgaatatctttaggaagattaggccattgctttttgtcagcttctagactgatttcagtttcagtccagaactgagaacgttgtaggagtgctaaacgctcaagttcaggatgcgctacacgaacgtaatcagcgataccgagagaatcgcccaggaaaagctcagggttagtatgatcccaattcaggtttagtaaagtagtcattgattttcctctttctcactatttcaggaatattatagcaaatcaggtagcgattagcaagtaaaatttcaaagaaaaaggagacccgaagatctccttagttttattaaagttggcaaccacctgaggcacaaccagctgcggcttcttcacctgctccaccaccgttttcagtgttgaagttagcgtagtaccaagtcttccagccatacttaacagcagtcatgaaatcacgaactactactgggccaggaattatttcattctcaaacttggtgtagtcatagtacatgttcgtactaatggactggctgaagaatttctgcatagttgctacccacttgatccactcaatgcgatctacatcataagccagtttatagctcatgagagtatcccaatcagttgcacccggagcaattgcaattactttgttcactgcactacctttgatagatacaatcttacgtggtggctcaattgagttagtaacacctaacagtacagaggaactttcgccaggcatctgagctgtcagaacagagttacgcataccatatttcaggatatctgcacgcagagattcccaatccatttctagacctactgataccagttcatcaacagttttcttgtacgtgtcaattaccagagttccttgagaaggtttggtacggttaaaccaatcacaagcaccttgttcttttgccagacgtacagaggctttatgcaggaagtaagaaagtttctcagcttcacggtgaatccagttacgggcttcttcaccttcgtacgccaaaccttctgctgccattgcaccagctgcgttcatcagaccaatacctacattacgacgcttcttagccgtatactccatagtcgggaatggatagtcttgaatttcaatgatggtatcaacgaatttcagaaggatgtagcaagttttctcccattctgccagagagctcatacggcctagaacaaccccgcctaggttacatagggatacttcaccaatatcttctggacgcatatcatccagctgatctggagttttgtacagttccgtaatatgttggaatggacgggttggctgagtaatttctacacacaagttggtcatacgaatcgggtcaaggaagttcccatgacggttagattcaccaatgtggtgagcatacatacgccctgtttccatacgaatacgtaaccaagtatctaggatttcttttgcagggattttaggagctgctggaattgtttttccttcgtggtcgatctttgtaagagatgccacacgtttctccgctgccacatagatttcttcaaacttagcctcatcttcaccataaaacgcttcgtgaacttctggtgcatagaagtaagacatgagcgtaatatcttcgtttttcaggtaacgttttaacagaaggttgttaaagctcagagagtagtccatcttatcgattttattctcgtctgtagcacgttgctgtttaacctgcatcaactgaataatttcaggatcgaagtacggataagatacagtagcagaaccaccacgggtttgctgagtgttcgcctttactgaacggtcgatgtgtcgataatatggcagttttccggaatgcgggaatgccccatttcgcaccggatcagcaattgatcggctttcaagatgatacccgattcccgctcttgctgcgaccattttgaagacgatgtgctcggctgtgtcgattgaatccagagtgtcagtggaatccacgaggcagcaactagcaaatccacggtcactagagcgcaggccaaccaatggtggtgtaggaacgttgattttgtggagcgacattgcgttgtaaaggtcgattgcatccagaattgtccagttaggttgagataacatcgccattgccatacccatgtaggcaaactgcggggtttcgtaaatttcgccagttgcgatattacgacgggaatacttatcaaagaactgtttcagaccaccgctagtgaagaggcgatcgcgttcatgatcgataacaccattcagagcgtcaaactgttcatcggaaatccatgcactcatgtcttcccaggcacctactttaaccatgtggtcatggaagaagcgtaaagaaggtggttcataggaatcatataggcgtttacgcatctgtgcaagacgtaattcctttgctacctcgtcatatgcaggattatctttgatcagaccttctgctgctttgattaatacatcttgaagtgtatcggaatctacaacccctttaggcagatttttcagtgcagccataactacggcagaccagctaacgttagcgttcttacacgcccatgcagcccaatcgttgagtttttcaggagcaaagtcttgaatagtaccgtcacgtttaattacttttgtgattctaaagtccattgcggtttccttcttatagttctcaggatttagatagtattctactttgttttgagtcattatgcaagtacaattttacattattcatgtctagcgaaatcgccatgtagttcttctcgccatttaatagcgtattcgttagctgcttctgcggtaggaaatcctctcttagaatactccttaccattaaccctgatacgtactctccagttattcctttctttgaatacgttcttaaaaccagaagaattatcttttcttagtttggcattacacatattttgtgtattattagcttccctaagattatcaggacggttatttaaagtattaccgtctctatgatctactataccctctggctggtatcctttatctaggatgaaggatatgatatgtgccatatacctttggtaattatagcacacaatcatatagtttccagttatagtcccagctatctttactttgccggatttcatccttctcattagtattcctgtttcaagatctacaaagaaggttttctccagctcttccttggttggatatataagtctttccatttaagtgtcccagtataaggataaaaagagcccggatattttcatacccaggctcgtctgtcttaccatttaattttatcggccatatctcttaatttctctcgtatttccttagccattaaaatatctacggaagtattcaattcattatagttaaatggtcgatttgggttagaggctacaattttccatgctagagaagtcttaggactttcttcaccctctttacgggtgatcatgtttgcagcactcagtgaagtgcggtgaattttagttttgcgatgtagatgtacgacatttcccatatcacaccagccccatctctttaaagatgtcatagaatgctttagattctcgggaacgtacgttctcaataagttcaatcattgagaaaggagcgtattcatacttttgatacacattcattagaagtgccaaacctgaatcacccttaatgtctttttgagctatatctccacaaattactaagcgacaatcttgccctacacgagttagtagacagatcattgcttcgactgagatattctgagcttcatcgacaatcacataggagttgttgaaagttcgtccacgagcatgttcgatagccaggaatttaactttctgacgttctacataccccttataagcttgatcaccaatggcccacttcatgccatctgcaatcggttccaaccaaggttctaacttttcagctaggtcacctggtagcatcccaagagatttgcctagaggttcattaggacgtactagaatcacttgctcaatattagagcgaggattagtaagttcctgagcagcaagaacggatgggataaaagtcttacccgtacctggttcaccaataccaacggtaatagtgttgttcctgatcatattgatatatgatttttgctctttgtttttaccttctagggatttagcaacgggaatagcaaaatcagagaagtttccctgaatgatgttatcttcgtagttgctgttacgctttcttgacccattacgggtttctcttttctgacgcggttttcccataaataacactcctatagtgtacttcgctaacagaggatcaacaaaaagatcttgtttatcaacttacaaatatattataccaatatctacaggaaaaagcaactacaattttaaataagcctatgacattgcagttaaataaaaaatttacttgcttagagagggagatgtatggtactagataatcattttatatcgcgtacatgggcgcgggattataatgtaaaatagggcaaggtgtcaacaacaattttgactgaaatcaagttacttagctctttagaaaatttatattgacatacgccttcaaatgagctataatagtagtcttagttagagaaggagaatataatgaactacggtattaaaatggctactaaaagaatgcaggatctagttagaaactgcaaggaaattattgaaggttcagcagatgaagaactgctatttaataacgctaataaaccctcagaacgttttcctacacaaagggatatgcttgcaggtgagttgagtaagtatctgattctagaagaaatgccaattcagcttcgaaatgctcatatgattggtgatattcacttccatgatgctgactatgcagctctaggtatgactaactgttgccttgtggctttggaagatatgttgaagaatggcatgaaggttggtaatgctgaaatcagtacgccgaactctatcactactgcggcagctattacagctcaaattattactcaggttagctcccatcagtatggtggtacttctgttgaccgtctcgatgaagtattagccccttatgttcgtaagtcttatgataagaaccatgcgtttgctaagcgttggactaaggatgaagctaaagcatccgtaatggctacggaaatgactgagaaagaagtttatgatgcttgtcaaggcctagagtatgaaatcaatacgatgttcaactctaatggtcagagtccttttattacatttggcttcggtctgggaacttcttgggaagctcgtctagtacagaaagcgattcttgaagtacgtatggatggtcttggtatcaataaacgtactgcaatcttccctaaactggtatttgtacttcgtgatggtgttaatatgaaacctggtgatgttaactacgatatcaagaagttagccatgaaatgtactgctgaacgtatgtatcctgactatatcagttatgataaggtggttgaagttactggtgattacaaagtttctatgggttgtcgttcattcctggctgctgcggaagatggagaaacttcaggtcgtaacaacttaggtgttgtttctgtgaaccttcctagaattgctatcgaagctggtggagatattgatctattcttcgatctgcttgagctgcgtgttgatactgcacttaaagcattggagtggagggttgatcgcttaaagtacattcaagctaaagctgcgcccatcctctatatgtcaggagcctttggattacgtctggggccagatgaatatgtatttgatcatttctataagcgtgcgtctgtatccctaggatatattggctgccatgaaatgctacagttcatgtttggtaaagatgtagatacaatgtctgatacatgtgttaaatttgtgaaacgtgttctacagtatatgcgtgatcgtgcagaccagaagaaagaagaaactcagttaggttatagtttgtatgcaacaccttctgaatccttatgtgatcgcttctgtcgtctagaccgtgaatatttcccagagcatgaagatattcttggtaagggttattacaccaactcccatcaccttgatgtggaacgtaaagttgctccaaacgtgaagtttgattacgagtctaactttactccaattgcttctggtgggtgcatttcctatgtggaattgcctgatatgaagaaattccctgatgcattggaatgggttattaactatgctgcaagtaaggttcattacttcggtattaatactccagtagattcctgtggtgagtgtggattcttgggtgagactatcgcttctgaggatggattcaaatgtcctatctgtggaaaccatgatcctgaaactttagaggtaactcgtcgagtttgtgggtaccttggaaacccaggagcacgtcctttcaacccaggtaaacaacatgaggttatgggtcgagtgaaacatagagacgttcgcgctaagtaagtgaatcagccaggttgctagtcgacctggcttttattttatttgctttcagctaaaaatttgtgtataattgatttataaatttgagaggagaaagctatgggcgatttgcttcctaaagtagacgtttcatatttgggagagcctagtgaagaacgtaaggctcttgattggttaggttactttgatgaacgtgttgtgctgcgttccgttgtgaaaggtaaggcaaagcattttagaattcgatacattcgtaaaggctttggccatgtaacaattgattatatcgaaaaagctggtagtatctctacagaaacaatttataaggttgaagaatgaaaaacgtaaaacatcttaaatatcgcttaatttacaatggccgcatggaaacggaagacctcgctcaactggcgattaactcagatgaagttacggttcgtgctttatccatcgagaagctgcgtgcatcttatgaaactcgtattatggaactagaggagaaactatatggcattctcgaatcagaagctaccaagtgatcaacttcaagatgctctcagtaacgtgttgatggaaaggtggaatgaagggtacaaagatggtgttacctcttgcgctataatgctagaccatatagctgaatccttgagggatcgtggtcaaccagatattgctaccatattgcaaggtcttagtgaaaacttccgagagcaggtgaaaaatgcgtagactaattgttgttagtggtgcaggtttaagtgttgatagtggcatccgtgcatttcgtacagatactgctagcggcaaagcaatgtgggatgaatacgatctggaagaagtgtgtgatattcatgcttttcgtggacagttctactggaaaacccatgagttctataacaagcgtcgccaagagttacagactgttgaacctaacgttgcgcatctccgtatcggagaatggttccagcggtatccagaagctgtattgaacatcactactaacgtagatgatttgctagaaagggctggtgtgccaaaaagtgaagttcttcatgttcatggctacttgcccgaagttcgtattaaggaattgccagatcgaaaagagtacatcctagatgtggggtatactgctattaatcctgatgaattttattgggcaaagcctaacgttgtgttctttggtgaagcagctcctgagtatgctttgatgcatgctacttttgatagtcttacggctaacgatatggttatcgtggttgggtgcagtaaccaagttatcaacttcaactgggaacttttccctgccctaaatatgggtactaagatgatgattgtgaacccagccgttcggtacgatgaacagcttgagtatgagaaacgtggtgttactgtgtggcgtgctggagctgccgaagtttttggtaacaaacactttattggccaagtagaagcttttatggaaggaactgtttatgcaccgcaaaagcatgtgtgatcttttagtatggccggacggtagttggtgctaccgttttgaatatgctactgatgatttctcgtggaagagtgatgatttctgcgttatctacgaagatacggcagaatggaaagaattcctaattaaggagggagaatatggtgaagaagatttttaagggtatctggaaagcattggtgtggacggtgaacctgattggtatgattactatctataccttgtttatggcggctatgtttggaaaaggtaagatcgattaccacgttcctttctctgatgaagctaaaactctgcaatgggataactccggtggatctaagtaatactccaattatttttctggatattgatggggtgctcaattcgagcatctctcaccatcacgctccggacgaagagaagatcttctttggtggagattgggtttttaaacccctactccaagcatttcagaacttcttaaaaccgtccggcataatgattgttggggtttcctcatggtttacagtacgtaacgaggtagagaatgttgagattatgactgccctaggtctggtcgatcgttttcttggtactactgattttactggtggcgggctatctagaggcaactctgttcttcggtttgtggaaaagtacaaactcaagcactggtgtgtcctagatgatgctggagctatgatgtaccagtatccaacagttattgtcaatggcagaactggaataaatatgcaggatctgaatgctatcagctacatgttggagtttagccctgatctagcaatgtgtaaagccctccaaaacttaaaggtatagatatgtttaataacctctttgaaaacacagtcaatccaatccttgttaacttctggcgttctctgccagataatctgtttgaggaagctatcaatactctcaagatttggtgtgagaataacgagattgctttcgcatttacttcagactccgatgaagctagctgtattggtgtaagtgtaatgctggaagatgggatagaagagattgtagattggaaagagctggactacatgggtctggtttttgctttgaactacaagctgttcatgcctattaaacatcgtttgatggtaaattatcgtaatggggaagctcctgctttccaggttaatgaacgtgagggctggaaatattcacctgaagaagtggatgctggcattcaaaaacttcgccgttttggatatcagatcccaggtttaactgcttaaaggaggcagaatggaacaagtattttggcgtcagattgatcctagtttggtagagcgtgctgaagggcttctcgctcgttggctgggggcggttaaggtttcggtatctttccctgatactcaagtagatgatcatagtctaggtattttcttggaggttcacgttcctgaactggagagtactgagtatgtggaaatggattggaatgaggtttcggcgatgggtctaatagttgcccttaacttctctatatttcatccacgtggtttggccatagctcgtgatccccataatggtgaatccccttatttattagtggcggatgatggggtttgggagtacactcctgagatcctagaagaagctaaaaatcaattaaaccatgttgggatttatgttcctggcttgaatgacgattgattttcagtagctcaatcctgattaccgagtcattttggctcggttttctctgtactcaagaccaatgatagcaccgtcggaaaaattttacttgcaggatgcttaaaaagttgatataatatttatattgaattgagagacattagtaaaaattgattttgctaatttttcttgtttacaatccgcaatacggaacagttcggctgccccattaaaggttgttttaactgttacgtgttagtttttgaataaatagttaatagaatacttaacgatctgcgtcccataggaaccctggtaaggcctcgaagcaacctagaatgaggtggttgtgaagtgagatgggaggagtgaaaaactccgagacgtgattctgtaagttatattgcatctagtatgagctagtatatgaagcattaggtgaacaaatctggcttagcggctaccctcaaggatttgtgcgatatagcgaagcagcagcgcagcgtgaaagtggaagttgccaccccacttcagtatttgaaattagtttgttggagaattaacagtaacagttgttctattctttctgaatagtcctaaagaaaactttttcatttcaacacaggagtagtattgtgttctcaatcctacaaggtcacgcaggattttcccgcgatctggcaacagggatgtggaaagaggttaaagtagaggattatacctttgctaagcaattctcagcttcccacccagaaggtaagccagtatccatgcctttcaaatttgatgtaattgatgaggttgatccgcaaaccctagtagaaatgcttcctcttatgagacgtttaacgtctgaccctcatatcgttgcggtacgaggtcgctgtcttgcacctagaaataatgtgcggcgtaagaagggcaactttaatgtatctaatccaagccacattattgcaatggacgtggatggtattgtagatacaggtggttgtaacaagtttgatcttgttggcatggcacgtcatatcattagaatgttaaatagtattagtgaggatatgtttcctcttgacgcagggtttatagctcatgcatcatcttcggctggtctaaaaccaggtatccgaatgcacttaatgctagaatctaatgtaaaagtgacacaagggcagatcaagttcctattcacatctatcaatgaaagtagtagacaaaagtacggctttgatattgccgacttagcttattactcttcagttcagcttcattattttgccgacccattattcaccgatggtattgttgatccgtttaaagcggagggcgcttcacgtttggtgtttgttaagggttcgaaagtaaatttacctaataatctcgttgactatgaaacaactagaggtgagttcaaagaggaatttttctccttgttagatcagattaaaggcaaaaaggccgcatctgataaagtggaagaaactatcagcgaattggaagaagctgaggatggtgtatatcttcgtattattccaaaactgtatcacagagcgttagaggatggtatagatttcaattggctagagaaggaaattcacccggctttatcagagtatattgcaactaaggataatacccgtaatattcaagactattttaataacggaagaaagcaggcgttaaaagcgtttgttaataactctaagcgagagattccagaagtcttgaagggtatacctcttaaaaagttagagactaactcgctagaaactgataacttcctgaaactgaatacagttccaccggaaggttatatgacgtttgttaaagctagccttggaacgggtaaaactactgctgtagttcgctggcttgactcaggtgtgatcgaaggtaatttccttgcagttactaacactagggcgctggtgtcctcaaacgccaagaaattcggggcaggtcagtatgataaatccgtagatatgcttaactttaagcgtggcgcgattaatcgtatgtctacaacgattcattcattacataagttcaaaagtttcatcggccagattgatgcaatctttattgacgaatgcgatgcagtaatgaatgatctattgtttgctcccgttgttaaaaatcgccgtgaatgtatccaggttcttcgggatatccttgcaacggctaaaatcattatcctatctgatggtgatattagtgcagaaactatcgaagcatacggttctctgattgagtttgataaaccagtagcgttctataatcatcaccgtaaaatgctttcaaaagctcatgcttatgagttccctgatgaatccagtatttgggtagccctacaaacatccctagagatgggtgagaaatctattctagtttctgactgtggcccagatgaactgaatgaaaaggggatggcattacgtcgtaatactggtgctttagttaaagaaattcactcaaactccacttctgatgtagatattcgtcatattctggattatacaactaatgagctgattgatcaacagattgattgtttattatgtagtccgtctgtaacgagtggtgttgactttaactatttcgataacgtttttgttatcacccgtacaagtaaccaagcgccaaacatgcgcttccaggcaatcaggcgcgaccgtggtgctcagaatatttattattttattgataaatccacgagcggtttctctgcgggttccgagcagtataatattgatgaaggctggattgagttagcccaacaattatacgcacgccgtcgtgaactggagtctaggaactatacgagtactttacgttattacctattagatcagggtgcaactatcgatattttcagtgaaagctggggtactatcgaaggcgcaggcaaagagtacacagaagaaagaatcaaagcaattctgcattctactcctgactattgtgctccacgtcatgctgatgcgtatgaatctaaacttcttctagttcgttattatcatcttgattccgtcaaggatgttacagttgaacatgtagaacagtatatcaaggataaacccaatgatagggctgcattcttccataagatgcatgatatgttctgggaagatattaagaaatgttcgaacgtaactattaaaccatttattgaagctctgaaaggtaagaagaaagatttcttccttaaaactggtcaaagtgctaacccaaaatatgctcgtatgtatttaggtatgatgggtattggcaaggatctagacacagagaagattgtagactggtatagaacttactgcaagattgagtgtattccaatcccagttaagtttatgacggatgaagagcgtcagatgcatgaggaagctctggctgaattaggtgctagaaatgacagcgaagaataaaaaatgggaaacaaggaagtttccagttaaagagagtaaacgatctgaatatgatactgcggagaaactatgtagggttgtaccccctcgtctcgcaggcctccctaatgtctccatatggttactaaaacaacggaagactcgtgtgtctcttcgcgttggcttcgaattagaaaaagtttacgcggagctggcttctttactcaaagaatcgtaaaaatttatttgctttcagcaaaatttttctgtataatagattcataaatttgagagaggagtatttatatggctggttctcgtagaaagaaactaatccacgaaatccctgatgaaacctttaaaaaggtcattgaacatctggagaatgggggtacgaagaaagctgcatgtgaaatgcttggagtttcttctaatccgacaatggaacgaatgattgaagaatggcgtgatcgtcagattcaagttgcggaaatgaagaagaaaaagcgtggcacactgattgaaggtgttgagcttgcaaacgtaattgaacagtatttatctggtgattctttcgaagaaatcgcagatcgtaactatcgttccgtagctatgattaaatctgttcttgaacgttatggtgctttacttcgtttgaatgatattgttgatccactgaatccaccattgattcctgatgatgcaatggcagaagaatttgaagttggtgaacttgtttgggttcctggctatcagtgtattggtgagatcaagaaagcaatgactaatccggttggatgctatcgtgtatggttgttatctgaaggtaaacaacagaacgtgcactatatgcattacgaattagcatctgtgaaacatctggaaaaactaggagttgatgttaaggctcttggttttaaatggagtcgtgaagaagttatcacgttagttaacgaagctgttaaagctgccttgaaactcgataaagagaaaggaaaacgccgtgagtaaacttaccgagctattaaaagctggagacgtaaaatatctccagcgagattcttggggaaatagtaaagttgagaccgtactcctagagttcgatgtggatactggaattgttcgtgaatgcacatggtatgaggagaaaacaccacctgtggtacgtactgtgtatttaaccctagaagaagcactggccgacgattgggagatcgttgaacctgattgatgtgtagcagttactgaaaaatttcagttgctttatcctgtaattcttgatataatattctcatagtttgaaagaactattctgtttaattcttaattaaggaaattgaaaaatatgactactccaactcagtggactgatgaactgttcgaaaaaatgtcttccgattatgttgctcgtatggagcaattcccagaagatgagcgtccgggcgttagcatggaaattgttagcgaaattgcccaggaaaacggtgtaactccgaatggtttccgtatgaagctgaccaaagcaggtctgtatatcaagaaagctgctagctctacttctaaatcaagcgcatctactggagaaaaagcttctggtggttctcgtacttctaaagcccaagcgcattctgatctgcgttccgcattctccgatgcaggtttagcacctgacttcctggacgatgcaattatcgacaagctgaccggtaaagcagctgctcatctggcagaagctatccgagctatcactaagtaattcttagataaatccaccaacacaaggaaatccagttatgaacaaagctgaaatcattgcacaatgcaacaaatttggtgagttttatctccattacgagaaactgcgtcagaaaggaaccacgtaccttcagggtacgatggaatttgatcctgctcaggacaagtacctggcagagcgtattaaacgtgagcgtattcgtaagccgaaagatgatgaaatcctcgttttctctcgtactaacgatagcttccgttttattcctgttgcaaaagttcgtcgtgtgacgagccttcaatcagagttagatcgtgcttctccagtaggccgataagaaaacaattagcccctatatggggctttttgtctatttgagaaacgtaaatgagcgatcaggtaaaccaaaactatgaaggacacgttgatgatcaatcaatccttctgtgggaaaaggaaggtgaacaagtaagactgacggtatctgaatttcgtgggaatctatacatgggaattaggtattggctccaggatattactggagaatggtttccaacgaaatccggcttctcttttccttacactctagatacaacatcacagctattctatgctttcacacaaatccttagtgaatctgaggtattgcatgaagtacagaaaagagctgaggaaatcaaagccaagactgaataagttcttggctttttctttataaatgtacttgcttccagctcaattttaatatataatattcttataaattgatgagaggatcaattatgaaagtaacacttccaaaaatccaagcaaagctaaatctagtatctcaagctagaaataactatctggacaacttcaagggcactaacgataaagcgtacaaagatgcgtggttaaaagaagccaatgaactagaacagttagttgcccaatacaataaagaattacaggtagatctgaatgactaatgtaaaagactttatcaaacgttgccaagatgcgtattaccaagggattagtattatttctgatgaagaatatgatcgcctgattaaacgttttccaatggcagaagattctatcggcccgaaaggtgatatcccccatctgtatcgtatgtactctttgcagaaagtttattacgatcgtggtgataaagctccgttcaatccacttggtcaagttgaaactgataagttagatggttgtgcgatttctctattatatattgatggagaatttgttcaggcattaactcgtggtaacggtattctagggaatgacgtaacacataatgttaaattgcttaatatccctaaaactattagccaaaaagttccaactcagatcactggcgaagtcctgatcactaaagaagttgagaacaaacgtaactatgcttctggtgctattaacctgaaagaagaagatgatttcatcgaacgtattggtgaaggtggtttaatcttcgtagcttacggtattcagtgttctgcggaaacagtaggtatcacagcccattatctcagtgatatgatctggctggaaaatgagaacttcttaacagttgttaacgttcgctcattctttaaatggattcctacggatggtaaagttatccgtattaatgataataataagttcttccgtgaaggatggactaataaacatccacgtggtgcatttgctgttaaacaggatgaagaaggtgaggttacaactcttctgaaagttgaatggcaagtaggtgcatctggcaaagttactcccgtaggttatttcgaaccggtaattatcgatgatgcaactattgaaaaagctacccttaacaacgttgattatattaacgctctcgatctagagattggatgccaaatccgagtaatccgtgctggtggtgtaatcccacgaatcgtagaacgagtagacgattaattacaaaccctttgctacccgttgaccgtaacggaattataaagtggttattgacattttcgccgcttaggtatatactattatcattcagttgagggatagaaagttatggcgagggtaagcaaagttagttaaaattgtatttgctaaatgcttaaatacttgctataatatttatataaattgataaggaagaaatttgatgaaaatcgaaattccaacacaatgtccctcttgtggttctaagctagatcttgttaacggtcaattattttgccgtaataagtcaagttgtccggctcaatcaagtaagttaatcgagaacttctgcacaaaaatgaagttaaagggtttcggcccaaaaactattgagaagctggaactgactaagatctcagaactgttttacctgaccgaagaagatttggtcggagctgtgggaagcaaggttgccactaagttagttagtgagttaaatactaaggttcgcggagacattgactttggttcagttctcggttctttaggaatccctctgattggagaggtagctgctaaaaagctatcccagggttgcactagctttcatgatgtgaaagctgacggcaaagctggagaaaattataaagcctggctaaattccccacaaggcaaggatgttatcgaactaccatggaaattcacaaccggtattaccggacggaaagctgatgtaatcattactgatgatttagtcgctcaacctaatgggatcgtggtatgtattaccggttctttgcaagattttgcaaacagaacggatgcaacaaactatttagaaagtctaggttacacggttaagaagtccgttaccaaagacgtaaaatacctcatctgtgaggatgaatcaaaacgttcttcctcatcttataagaaagccgaaacgaatgggatagaaatcctgtcgattaaagaactattggagaaaaataataatgtctaaactgaactggaacgtagaaggtgtaaccgagtctctgaaagcaaaagctaccgctctgggtgttgctgtaatctctcaagaacaagtcgctgctatcgctgctgaactggcaactgaaactggtaaggacgtaactgcacgttctgttggttccaaactgcgtaaagaaggtttcgaagtacagaaagctaacgaagtacagaaatccccttggactcctgagcaggaagctgaactggttgatttcctgaactctcacgctggtcagtatacttatgctgaaatcgctgctgctgtagctggtggacagttcggtgctaagcaggtacagggtaagatcctgagtctggaaatgactgctgctgttaagccaactgaaaaagctgccgctgttcgttccttcactccggaagaagaaaatgacttcgtaaatctggttgttggtggcgctactatcgaagctatcgctgctcactttgatcgtaatatcaagcagattcgtggtaaggctctgagcctgcttcgtgaaggtcgtatcactgctatgccggtacaggaaacttcaagtgctaagactcgtgaagatctgttagaaggcctggatctggcttctatgactgttgccgaagttgctgagaagactggtaagtctgagcgtggtgttaagtctatgctttctcgccgtggtctggttgctaaggactatgatggtgctgctaagcgtgctaaactggatgcaaaagccgctgctgctgaataatctggtaaattaaacctaaggggagggggctatgctccttcccctttttgcatttagaaggcacgaaagcgtgcaaaggagaatgaccttgtttaacgtgcaagctgtagtgttgaagatgcttctggcttctgaacagaaacaaatagcattggaaacattctcaaaactgcataaagatcattttaatgacgctttctcctcaatttaccaagccgtccagaattattataagaaatataacgcaatgccgtccattgacgcactgatgcttgaggccaataggaacgcccgcctttctcaagctcttgtcgtcttagctaacactcaaataccagaagtgagcatggaacaggcacttgaagtcctagaagctgagtatacacaggatctattcctgaaacttctagaaacagacgtgcttcaagatttaacaatgctggatcagggagaaattctaaaccgagttgcctcccttcacttaaaattagaagagaaagtaacgaatactggaaaggtattcaacgcagacacaatgcgtattttccagagagaagaagataccaaactgaacttaattgctcttggtatttgtaatgagttcgacgcacaaattggtttagctcgcacagaaacgttactgcttggtggttggcgtggtactggtaaatccattatctgttcaaacatacaggttcagcaatatttaaatggagatattgctccatatttctcaattgaaatgaaagagcatgaggtgtttagacgtaatttagctatgttagctggtgtttccgccttagctatgcgtaataacactctcgaaggtgctgctttactgagattagcaagaactagggctagaatgtttaatggtggtgaagagcttttcgacaacttcgttaagcagtataacatggctaaaatgagcgacttctatgatatggaaagtaaacttattgaaagccatgagctccacaccccaatgatcatcgtgtatgatcctgagctgtcaattactacagttgatgtagaattaaacaaactagttgctagatatggtgataaagttactgtagctcttctagactacattaaccaaaccagacttcctgattccaagactattgatatgtacgattggaaagaacagatggttgttagctcctctttcaaatctatttgccagaaacataatgtggctggtatagctccttaccagattgaccaagatggtagaactcgtatgtctaaagggattcttgattccgcagatatggctgccaaccttaatgctgcaaaagctgataatggtcagggtgctattatgtttgacttcgtaaagacccgttcctctgatagtgtgaagtttatgcctaagatgaactgggagaccctacgtttagacaataccactaacctagcaatggaagatattgcgcaaatggaggctgagtttgtaattcctatagagaaagacaagccagctcaaccaaaacgtgctaagaaagagaaaccagaaaattcatcaggtgaacaggccagcgatatatgagtagaataacagaactacttgatctgaaaggcattgaatacaaagacacaggtggggacatcctcatctgttgtctcaacccagatcatgatgataaacatccaagtttgcgtattgatccagaatctggagttatgcactgcttgagttgtggcttcggtaaaggtataccgagcatttaccattattttaatgagagtcaataccgacagtccccaagattgtcacaagtacgtaaaaagatttcagagattaggaatggatctacgaatcttgcaattcctgaatctgcttaccttttcgaaggtgatttccgaggtataagttctagtaccttgaagaaatattttgctttccaacatcaagcagactgggaaggcagaatcgtgttccctatcacagatgctgttggaagaaatatcttattcttaggacgttcgataaacagttctgcccctcctaaatacttagtaaaacctaaacaagtttcaccaccgattttccctgtacgatataatactcctgttcttgtcttggttgaaggtatctttgatatgcttaatctagaagataatggagtgaactatgcttcttgctgttttggtacacaccagttcactgcagataatattgctgacaaattcagtccatacattattgcaggagtcaaagttgttgttattctattagataacgatgcttctggtaacaaagctgcacaggcgcttgccaagctaattcgtacaaaaacacgattaacacctgtagttggtaatttccttcttccagagggcaaagacccaggtgatcttaataaacaagagatcgatacgttagctcaacgtattgaaattttagttgctgaatcgctcaaagatttggtataatatattggtaagttagagaagaaacactgaagttatacttacttaccaaaaggagactaaatttgaaaattgcagtagttgacaaagctctaaacaacactcgttacgataaacacttccagctttatggcgaggaagttgatgtattccacatgtgtaacgagaagttatctggacgtttgctgaaaaagcatattaccatcgggactccagaaaacccatttgatccaaatgattatgattttgttgtactagttggtgctgaacctttcctgtatttcgcaggtaagaaaggtattggtgattatactggtaaacgtgtagaacatggtggctatgctaactggattgcaagtatcagtccagctcagttacactttaaacctgaaatgaaaccagttttcgatgcaaccgttgaaagtattcatgacattattaatggtcgtgagaagattgcaaaagctggtgattatcgtcctattactgacccagatgaagccgaagaatacatcaagatggtgtataacatggttacagggccgatcgcatttgactccgaaacctcggcactatactgtcgagatggttatctgcttggtgtttccatttctcaccaagagtatcagggcgtgtatattgactctgactgcattactgaagtagcagttcattatctccagaaaattctggatagtcagaatcatggcattgttttccataacttgaagttcgatatgcacttctattcctatcatctaggactttcctttgataaggcacataaagagcgtagacttcatgatacaatgctgcagcactatgttcttgatgaacgtcgtggtactcatggtttgaaatctctcgccatgaagtatacagatatgggtgattatgactttgaactggataagtttaaggatgattactgcaaagcacataaaatcaaaaaagaagatttcagctatgatctgattccgtttgatattatgtggccatatgctgcaaaagataccgatgcaactctgcgtctacataacttcttcatacctaaaattgagaaaaacgagaaacttcgtgatctgtattatgaagttcttatgcctggttgtgtattcctgcaacgagttgaagatcgtggtgtaccgatctctatcgatcgtttgaaagaagctcagtatcagctgactaacaatctgaatgctgctagagcgaagctgtatacttatccagaagtagttcagctagaacaagatcagaatgaagcgtttaaccctaactctgttaaacagctccgcgttcttctgttcgattatgttggtttgactccaactggtaagctgactgatactggtgcagattctactaacgcagaagctcttaacgaattggccacccagcacccaattgcgaaaactctgttagagattcgtaagctgactaagctgatctcaacttatgttgaaaagattcttctgagtatcgatgccgatggttgcattcgtacaggcttccacgaacatatgactacttctggtcgtctgagttcttctggtaagctgaacctccaacagttacctcgtgatgaatccatcattaaaggttgtgttgttgcaccaccgggttatcgtgtaatcgcgtgggacttaacaactgcggaagtttattatgctgctgtactgtctggtgacagaaacatgcaacaagtatttatcaacatgaaaaatgagcctgataaataccctgacttccactcaaacatcgcacacatggtatttaaattaacatgtgaaccacgtgatgttaagaagttattcccagctcttcgtcaggcagctaaagcaattaccttcggtattctgtatggttcagggccagctaaggtagctcattctgttaacgaagcacttctggaacaggcagctaagacgggcgaaccgtttgttgaatgtactgttgcggatgcgaaggattacatcgaaacttacttcggtcagttcccacagcttaagcgttggattgataagtgccacgatcagattaagaactttggatttatctatagtcactttggtcgtaagcgtcgtctgcacaacatcaactctgaagatcgtggtgttcagggtgaagaaattcgttcgggatttaacgcaatcattcagtctgcttcttctgatagcctcctgttaggtgctattgacgcagatgatgaaattctatccttaggtctaggagatgagatgaagattgtaatgcttgttcatgactccgtagtagcaattgtacgtgaagatctgattgaacagtataacgatattctgattcgtaatattcagaaagaccgtggtatcagtattcctggctgcccaattggtattgattctgactctgaaaaagggggttctcgtgactactcctgcggtaagatgaagaaacagcacccatcaattgcatgtatcgatgatgacgagtatacgttctttgttaaacaaacgttgctcgatgctgaattcgaatacaagaaaattgcagcattggataaagagcatccagatcacagcaagtacaaggatgataaatttattgctgtatgtaaagatctggagaacatcaagcgagttctaggtgcttgattttaaactgcccgtatatgcactacgggcgtttacctctatagagcaagaaggcgattattctgtaataactacaaggtataataaatatgtgctagataacaggaagttgcctggcacattttctcaacgtagacttgtcctatttgagaaaagaaaagaattgccgtataagctctaccctattcgtggtcgaataacaacactatctcaattgataggatctaaacgtacccagtttatagattctgatggaaatctcataaattggaagaaaactacgttctacgaggtagttacggccaaagttctgcattctgcaagaatttataatggaaaataccagtgctatgtggccaaagtaccatatccatttgtattatcctacgcacccgcttatataagctatattctggtaaataatagccctgttatttatcaagtccatcaagaggagcctgaaattcctagacttagaataaaattatgaaggttgttatatctaataaagcctatttcaagcccgatgatgaactttgggattattgtagtaagcaaaccacttatcatgtagagacaatgacaagtaaataccctattatgtataagaatagtggtgttgttgctaaagagattaagtggatccccattacccgtctagatttattagatgctaagggagttaaatacgaactggtcgataaacgcacgttggctccggtagagataccagaaccttcatttaaactgcgtgaagaagatcagttgcctatatatgaagaatgtgatgatacttgtattattaatggtaagccaggatttggtaagactattctagcattagcattagcctataagttcggccagaaaactctggtaatttgtactaatacatccatccgtgaaatgtgggctgcagaagttcgtaaatggtttggctttgagcctggtattattgggtctggtaagtataatattgatccacctatcgtggttagtaatatacagactgttaataaacatgcgaatcagctatctaaagtattcgggactgttattgtagatgaagtgcaccattgcgttgctactacattcactaacttcctagaaatatcatgtgctcggtataagatcggtctatctggtacattaaaacgtaaagatggtctgcaagttatgttcaaagacttctttggatataagatctttagtcctccggttaataacactgttgctcctgtaatccacaggtactccgtaccagtagagttatcaggaaatcagaatgttccgtgggcgttacgtgctaatgatgtatataatcatccagagtatcggcagactattattaacttagcgcatctgtatgtaaatatggggcataaagttctatttgtaagtgataggacagagttaatacaatccgtgctagaagcattgtctcaacgaggtgtagtaacgcatgagattatcggagccacgcctctggatgatcgtttgagaatccagaaagaggtggcagaaggcggaccatgttgtcttgcagcagctcaaagtatcttctctgaaggtatttctcttaacgagctatcttgtttaataatgggaagtctcattaacaatgaatcgttaatagaacagctagcaggacgtgtacaacgtatagttgatggaaagttagacccgattgttgtagacttaattatgaaaggaggtactggattaagacaggcttctggacgtatggccgtgtatcgcaataacgcatggaaaactattactatgactccggagaaagcagtacaattagcaaaaattgcatttggcaacagctcctaaatattgtataatatatacataaatttgagagagaaagtttcggatagattgacaagtccgaagcagaaaaataaaaattgtacttgtcaaatcctcacaatatggtgtataatatgtacataaagttgagagaaaaatgatattctttgattatgagaaaatttatctcttagcaagaggaaactccgacctaatagtcaagttatttaaaagaatgcttgcagagcctgatgctcaccaattactggtcggatcttccttcatcatcaatgaatcaacgattattgataatccaaataaattgtctaatagacaactggcagaatatctgggaattttaagtctacgaaattatgccgaatataagtttacaaacgatccgagtttggacatgcaatatgttcccatatggataccacgttctgtaattgacactaacccactaatcgcaattaacaaatcgaaattaatatttaaagaggaaataaaatatggctaagtcttggggcgaaactactggcggttctaacgataaaattgacttcctgaaattcaacaacggtatcactcgtgttcgtatcgtttctggtgttcttccgcgttatgtctattggctgactaacaaagatggtaatgcagctccatttgagtgcctgcgtttcaaccgtactaaggagagctttgttcgtggtaaggctgatccgattcacgagatgggcttcttcgagaaagagctggataaagacggtaatcgtgttcctctgaaacctaagaagaactacatcgctttcgttattgatcgttccgataacaaactgaaagttatggaagttaaagctactattctgaaaggcatccagtctatcatgaaacagctgaaactgtctgacccgttcgatattgatatttctatcgagaagaaaggtaaaggtttcgatactgagtatgacgtacagcaaattgcagcaatgcagttccagatggctctgaaagatccttctagtgctgagtctaagttgcacgctgctgatgttgatatcctcggtgaagcgctgtgtgatggtgaaggtgagttcctgaagttcgagaaagttccttctctggaagaaacctaccctgttccttcttacgaagagcagaaagaagctatcctggccttcatggaaggtcgtgagaagcaggaaggtggtgatgctaaaggcggttctgaggctggttctcagaaaggcatcgatgccgaagctgctagcgatctggacgactaataaccaaaggggagctacggctccctttatttttaacctatgagaatattatttagtgctgatcatcacatcaaactaggacaggacaaagttccaaaggaatggcagaagcgtcgattcttgatgctaggagaacggttaaatgagttattccataatcataactgtgatcttcatattgctggtggtgatattcttgatgtggccgacccgtcgtcggaagaaatagaactgcttgaacagttcatgtcaagacttgatcatccaggtaagatatttactggaaaccatgaaatgttaacaaaaactatttcatgtttatatcattatgctggtgttattaataaagtaactaatggcaaatgggacgtggtaactaaaccttatcgctctcctgaatatgatatagttccttacgatgaaatccacaaaacaaagtggaagccatctgaatcaaaactatgtttcacgcatgttcgtggtgaaatccctccacatgtaaaaccagagattgatctaacgaggtataactgttatgatactgtaattgctggcgatttacactcctatactaatagccagacaattggttcaactaaacttctttatccgggatctccattaactacatcgttccatagagaacgtacaaaaggtacgaatggttgttttatcatcgatactgatacattaaaagtagaatgggttgaacttggtgacttacctcagttaatacgtaaaactattgaggttggtgaggaaatggaacctagtgattatgatagagtaatctatgaagttacaggtgacgttgttcagttgaagtcagttaaaaactccgatctcttagataagaagattaaccatcgagttactaaagatgctaaattaaatcttgtcgatcttgatatgctaggagagcttgaactttacttccgtgaagttgagaagctatctcaggacgatattgatagaattttagctagagctgcgaagtatgtcaaagattataattaagacactgaaattcagcaacgtaatgtcttacggtaaggatattgtaattcatttcgataaaaacccagttactcagttaatcggtggaaacggtttagggaagtccactattgctactgttattgaagaattgttttataacaagaactcacgcggtatcaagaaggacgccctcttctcttggaatgtgccgaagaaagagtacgatatgcatgcttacttctctaaagatgaagatgagtatgaactccataaagttgttaagtcaacggctaaagttacactgattaagaatggagaagatatcagtggacatacagcaacccaaacgtataaaatgattgaagatataatgggcggagatttccaaacatttactaagctcatttatcaatccgttgggtcaaatctagacttcctgaaagcaacagatgctactcgtaaagcatttcttgtaaatctctttaatcaagagcagtataaagaaatgtcagaaactattaaggcagatcgtaaagaagtggcaagtacgttaagtaacttgcaaggtcaaatggccgtaattacgaagatcctcaatggtaaaaacaatctcggaagtttgcaggagcctgtagaagttccagagtttgatgaagagccactgtcacaggagttgactgaatcgaaagtcaaggcggcattagctaaatcacaagaagctaatattactaaactgcgtaatttggacaaagccgtacaagttgccgaacaatctttcgaaccctataaaaatcttcccgcgcccatgtgcaaaaacgacgagatctcgagtgttacgcgtgacctaacgattgttatttcacgtgcgggtgaagtcaagaaacgttatcagaagttcaaacatgaggcttcagcaactgaatgtcctacctgcggaactcatctggatacaacggctgcacaaaaagctatggatatggcacgagttgaatatgaccctctctataaagaaaaggtagaacttgaagctaaacttgagttattaaagaaagaacaactcgagtatacagcttacactagagctaaggatgctcttgataaagctatagcagctagagacgagttcaaaaattcaatgagtgattcttcttttgaagaactcaatgtgcaaatcctacaggtgcaaatccgacagcttgaacaggaaattgctgatggccgttccaaagttgcaatggctaaagagcataatgccaacgtcgagattgcaaatacaaaatataaaactcgattagagcagatagagaaagcagaatccgaaatggaagaaatcacttccaaactcgaaggagtagaggaagctgttgctgatctggatattttgattgcagctctgaaaaatctagttggttataaactagaacatagtgtgaaagtatttgaagaattaattaataaatatctttccattatgacaggtggcaagtttgctctaggatttgagcttgatgaaacgaaattacaagtagtaatcttcaatgatgggaatcgtaccagtatggagaactgctccactggtcagcaaagtagaattaacctagcaactctgctagcaattcgaatgctattaacatctattagtaaagtaaacattaatcttctgttccttgacgaagtgattagctttattgatacgaaaggacttgacaccctcgttgaactattaaatgaggaagatagtctgaattctatcattgtttctcatgggcatacgcatccattagcccataagattaccgtcaaaaaagatgcagaaggattttcctacttagaataaaacatggccgtagatagtagagagaaaggtaaacgtggtgagtatcaagtaagagacatactacgcgaacgtactggtcttgagtgggaacgtgttccaggttctggtgcttttggccagagccatggactgaagggtgacatctaccttccaccacaaagtggacatattagtaaatactgcttcgaagttaagtggtataaagatgataatatttcaagtaatttatttaatgttggtgaatccactctagagaagtggtggcagcaatgttcacgagaaggtgagcagatgaactccaaaccagcattgatattcaagaaagacagaggacagtggttagttgcattggatagctcagacccgatggttgacaacttaatgagtcgtacccatatggtgttaaataagaaagacatggaaatcgtaatcggtttatttgagccgtggttacatcacttatctgttgaggacttaattaaataatgagtaaatcctggggaaaatttattgaagaggaagaagctgagctggcttctcgtcgtaatcttatgattgttgacggaactaacttaggcttccgctttaaacataataatagtaagaaaccttttgcttctagttatgtatcaacgattcaatctctagcgaaatcttattctgctagaactacgattgttcttggtgataaagggaagtctgctttccgtctcgaacatcttcctgattataaaggcaaccgggatgaaaagtatgctcagcgtaccgaagaagaaaaagcactagacgaacagttcttcgaatatctacgtgatgctttcgagttgtgtgaaactacattcccaacttttactattcgtggagtagaagcagatgatatggcagcttatattgttaagcttatcggtcatctctacgatcacgtttggctgatctccaccgatggtgactgggatactctcttgactgatcgagtttctcgcttctcctttactacacgtcgtgagtatcatctccgtgacatgtatgaacaccacaacgttgatgatgttgatcagttcatctctctaaaagcaatcatgggagatcttggtgataacatccgtggcgttgaaggaatcggtgcaaaacgtggttataatattatccgagaatttggaaacgtcttggatattattgatcatcttccattgccgggaaaacaaaaatatatacagaatctaaacgcatcggaggagttacttttccgaaacctaattctggttgatttaccgacttactgtgtggatgctatagccgcagtgggtcaagacgtacttgataagtttacgaaagatattttggagattgcaggacaatgattaaaattaaactaactcatccagattgtatgccaaagattggatcagaagatgccgcaggaatggatcttcgtgcgttctttggtactaacctaaatgcagacttaaaagctattgcaccaggtaaatctcttatgattgataccggtgtcgcggtggaaattccgcgaggttggttcggtttggtagttcctcgcagctctttaggtaagcgtcatctgatgatagcaaataccgcaggtgtgatcgactcagactatcgtgggactattaagatgaatctgtttaactacggttctgaaattcaaacactggaaaatttcgagagactttgtcagttagtggtactaccacactactcaactcatcattttgaaatcgttgacgaactagaggagacagaacgtggagaaggtggatttggaagctcaggaagtaaataagtacgattattcagaccctaagatggtagctaactttgagcactcaaagaactatcacgttgcggttgctgagactaacctaaacaatgtagttctgaaagtagataatgaaggtaatgtaatccattgggatgaagaggcttttgttgaactatgtagcaaatcgcaagatcctacgcttagagctatgttagcagtgtttaatttaggtattattgctggaaacagataataataaaccccagtggacaatccactggggttttcttttacttatcaagtagttgttttaccaatttcttgagttcatcaatttcttgctgctgcttttcaacaacttcattaagctcgttaaaagcattaactagaagagcgttgacacctgcatgggagacaccaagcatactgtcttctttttgtggttcaatcttatatactgcttctggaaggacagactgtacatcttgagctataataccggcctcaacattatatgtagaatacttatcttccttgaggttacttcttttatggtaggtatacccaactagggatttaaccttttctcgagctgtctcaatcttctgtagattagctttcatacgaatatcagaagtactaacccagttacccgctgcagcacttccatcactcataaagcggaattcagcccctagtacccttaggttggtttgtccaccacccgcactccataaaacgcagtccatacctccctgccagtcctgaccccacataacagatttccatacgtttaccgcagaatctctagcaggcatttcaaccagtaaaccacaagctctctgtctccaaagatcccagctacctgattctaccgaaccccctattaaaccagcagcatctccggataccgtacctacagatagaaaagtaactctattacctacagtactacctcgggatccaaaagcatccttaacaggtatccaaggactccaagtattgttatccatagtacgtaccgctacagagttcttccaagctccagtaaacagggtagcacgttgcattctatacctagaatcattgtgtattaaagtctctaagaagaaccatgcatcttcccagtgagaaatttgttggaaaggtctggtaccaacaatattggagccagaagaaggaggaactgtatatttacagtttacactaatagtatcaaagttaaatccatttgggtatgcctgatcgatagaagttagtacaaaccattctgttaatccaaggtttttcctagcttgggaggaatcgttggcccctgtaccgccagcagcaatagataatggaatccatccaccggtatcatcacgccacatcccccattctccattgggtcttgcagtgattctatacccaactccaggagcgtacatcatagtctctgtggcagattgtttaaacctatcgatacctaagttagttctagcaccatcaaaggagttagccccagtacctccattagagaattgaacagtagtctgagcgttaaactgctcctgccaacctctccagttgcctgtaccatcaagaacgttaacccaagaactaccagatagtccgacagcatgtagtactccgtactgagcagcaccatttatatcaaccccatgacaatggaaattatatgtccaccaaccttcttgtttaggtggaccattaactactacttctccagaagagtaatacccactttggcctgctactgccacgtagtttagtatgttttctccatccggtactatttcagccaaagcaccaacagggacattaaggctttttcttgcggttttaggagtagttccacctgtgccgccgaaagcaactttcatagcactaactgctgcagtagcgctatcaattaaaccaaaatctccactattatagataaataaagaatatttaccatcaggagaagtaacaaaagttccattatcttgctgacgcaggcgttctacttgtagatttactctagcattttctagagtttttgctccggtaccaccttgagcaatagtaatagcttttgttagtgcatttaattctgtaatatcgttattagcaccttttgcagccttagtatctaaagtagtattaataccgccaagtgcagtattgatgttaccgattgaatcattaatactcttgatagcagcatcagtagcagctttatcagtattatactttgaaatttgtagatatttagaagttagtacaacagcaccagcttctccatcgacagagaaaacaccagcaaccgcagcatctctattaactacaacgtaaggcgccattgcgccggatttaggcattaaattacgtgacatagtatttccttagtaaataggggagaattactcccctatactcttacttatttaccagagtagctactagagccttcaactctgcgagctctgccttgactgttttcaattcttcctgtgattcttcgaacttaatagataagtaacgaactgctaaagctgtatcaatagcaatcggattgatatctaaggctagagtatcatcattgtaatcaatgatcttaccttctacgttctcagtttcttcatcacagcaatgatgttctggtgtttctataataggagaaccaggaaccagttttacgtactcagggtcaatctggtagagatcttgggcaataacaccacggcgtacacggttatacttatctagtttatatataaatgtggtaggtttaaattgctttatattctcataagaggctaacccatcatcatagttaatatctcttttgatatctctatctgaagaagggttcatagcaatgtcgtagttaccaccccaaggatcattaccccaagtgtatatactaccattctgtctaaaagtaaatgaacgatggaatctaccatcaccatttaacttaagagcagcatcaggccatgcagcgttaccattagaaatacatccaagcccaacacgtagtgcgtagcctcctgtagatacagtaccaccagaaacaaatggagaccacccaccatcattacttgttacagaagctgcatggaaaggcgcacccatgtaatcccattctaagccccaagctccttggatacactgaccacgaaaacccctttgagcggtcatgtgcccaccgtaagagttatagtagttaaactctttccaatctgtaccagcgttgttaactccaatacggaagcagtctaagtcctgtccacccccacgaatacctcctacctgccagtatccactataccaattcccttgaattatgttagtccagctaccaacacctggatcattattagggccaggaacagccatatggatttccctattaccacctgctgtttgttggatatagatcttttctccacctttgatccatccctgagccgtaacactattccctgcattgtagttagcagcatgcacatcctgtaatccagttaaatcaccagtttcggaaaattgtatgtaacggtttacgccattaagagtgttattaatgtgtagggttatttttgcgaggtttgattgcatctcatgatatattctaccttgagtaacaacattttggtcggattcctttactctatttaagttaaggataccactattaggtatattttcataattagataaatctactcccgcaaatctaggcgtatgataataccctaacccaaagttgttaagtgcagcacctttatccgtagctccagtacccccagaacttattggaagagcaacgttaacttcatctccattcttccataaaccccagagaccatcattagtaatcctaatctcgtgggttcctacaggactttggaaagagttaaaagctccaccagcagggttatcattgcagaaaactccactaacttccaaagctttcttagctgcaccaactgtagtagctccagtacctcctttgttaataccaagagttccctgggtatcattatttaaatcaggtttattagcagtaccataaagaatattagtatgtactgtaggagattcaccatctaactgattgtcattaatagtaccaacaaaaacaacaccactagagtactgaggacaaataaatgagtgagtatcagcagtcttagagtaaaatcccgcagaatatgctggtagcccctctattgctgtgtcattcctatagtatccagaaccaaaagctctacatgctttaaagaaagatactaagtcaggctcatttagcgcaagacctgtaccacctaacccaaaagcaccacgaagcaagacctcaccgttaataccgtcccaaacgttcttagtaacaacattacctagagaaaggtttccgttttcatcaggtataatatttccgttgaccattgctacgtaaggtagcttaatagcaccagtatcatcagcaggaccaattccgttcacggtagtgatatatgggatctgttccttaatagcaccagcgtcttcttcgcccttagttggtgcacggaatgcttgtccttgcatcatatcaggtaaacggaatgtagtagaaccatcaccagtggagaagtagagagttgcaccagcttgccattcagcttctgaaacagaaggaattaggccagcttcgatagcttcccaagtatctggatagtctacacgaagtacttcacgaccatcagcaggtaaaacaccaggatacccaacaccagaatctttatcataagggaaccaagtaacttcacctagccataaagaagggttaccaccgggaagggtgatctgcacgttaccagcatcatccgcatgaacgttgttgattgatacaagtttctgttcaatttctactagctctaaaataggagcttcagctgtaccagctaccttataccaaccatattttgaatcagtttgattccaaactaaaactttttcatctagaactcggtttgcaacatcagcatcagcttctgctttagtcttataaaccttgataaaaccagaaatatctactttatcaagtttaccatcaacaacctgagttgcacgatctgcttcggctttagcacgatctgcctcagcagtagcatctacagctttatctccagcttctacagcagaaccagcagcattagtttctgattctttagcatttagttctgattgcttagcagcagcagcgtgttctccagctgttgtagcagcagcttctgctcctgcttttgctgtttcagcaccagtcttagcagtttctgcggctgtctgagcctgttgcgcagcagttttagcctgttccgcaagtctacgactagtttcagcattttgagcagctaattcagcagaatctctaaatcctttggattcttccgcagatgtagcagatgcttcggcactcttttgtgatagacccgcttgtctttcagcctcagcagcagatgccgcagattgagttgctgaagtttgtgaggaatcagcatagatagcagctaggttttctgagtccttagcatttgtttccgattctttcgctgcaatttcagaatcttttgcagcagcagctgaagctgcggatgcttccacagccgcagttaattcaccagcagtaatagaactaatagagttacctaaaactactgtatacttaggatacttactagcagtagttgtggtatcatctatgttcagaatctgctgtacaataattttagttctgattgccattattgagttactccatcactgatgtagactttaccttccatgatacggaatgaactgacttctgagccaataacatcacgagtcattagaatgtcatagtaaccagcgaaacgttgtcttgggttatatttatcacgttctttagatgctttattaccaatattggtaacgtcggaaattgaaagactaatagcagcggctccttgagcagcatcaattacacgagttttaaaggttgctagagtctcagcatcttcatcaagacttatcttaatagttccacgaagcgaatatcctgttaagtttacaggaacttcagttggaggatagacactatcatcaacatccataaattgcatgataagaccatacggtactttctcatcaacaacaatatcaattactctattttctgtactcattattttaccttatatggatatacccagttgctaggtctatcttcattctgtagtaggcttccgggttatcagacaacgccgcgtttctatcatagataacgttaacaccaatctgagataagaaggcattatttgctacaatcttgctggcggttatagtaccattaacaatcatatcgccatgtagcaccattgcaggactaacccaaccggatccattccattgacgagtaaatgctgattgtggagcattactattaaactcagtcagtacatcatatctaacaggtggactaccaaagttgttttggaagaaagcattagcttgtccatcatcccaaccaccaagaccaggaatacctaaggaatacatcccaggaccgcgctgcccatcatgaccgatagtaccctcagtaccactccattgaactacatctgaccaactagtacctgcgagcagtttattagtaactggatcaagtgtacctgtagtcgcatagatattttgagtcatatctgtacgattaggtggagtttttgaccagccaggaggtggatagtcttgttctaacggttttgcaggaagtgaggttgctaacttataaacaaatactgtttgcttaccctgcaaaccagttccgatatcaacatcaccattaggcgttccaataactaccccactagagatacgtaaaacatcaccatcataacgaatccactgtgtggcattaccaatgtctaattttgctttggctgaggcattatccatccccatccagataccagagttattatccccccaagatttgccttgagtgtagattgcaggattatccttaccagacaagttagtcataataaagtttgcagcattaatatctctagtaattactttaccatcaacgttaacaacacggtttataggatcaaaggagattggagctttaccttcttcgtctagcagaccaatgttaatagcaccagttgcagcatcaattaagaatgtttgcttccatgtaccattgtcattaagtttacctttaatgtacgcatagttaacttcaatacccgtttcattaacaaagctgttatcaagtggagtatcttcatttagtatgaatgttacaggagcagattctgtaatatcttgtttatcagggccccaggcaatcgatgcaaccttaaaggtatgatcaactttccatgggaatgaaacaatcgttgcagcttgggcagcacccacgtttatcttttgggctttagtccatccagttctagcaaattccgcagaatctatataagtaactaagaactcacgaacgttagaaccaccaccttttaaccaatcccactcaattctaacatcataacgttctttaccgtctgcaattctagcagctttaaaccgaatgttagttggagcagtaggtggtacgaaattataagctacagtgaaaacgctaggatattcataataaccagatgaatcaactgtaacaccatccggcatcgtaacttgaccagatattctgatcttatagtcgccaacaggaacaccaccaaatttgatagtagttcctagtgcacctatgtaatatttaacccattcactatcctctgatgcagtgctttttaattcaatagtgcaataactagcttctccagaagtttctacgacaactattggagcaccaacacctacgtcaacaggttctgattctgatcttgcagcagtaatgataggtctctcttttgttttaaaattagtttcattggagagattaataccaatttttgcttcaagaagttcttcatctataatcgagtcatagaaagctccctgaacctgataagtggatgagggagttaaattgttgatcatgacaaagaaagtatcgataccagtataatctcgtctctctacttcttcgccaagctttagccagaatgatctaccgataacgtcgtagtcggtgtagatagaatgctggatatacgcaagggtatatccagtcataatactatttaagaccatcttggctggtgcattattcgaaatcatttaaatagatgcccaatccacagattgctcgccattatcaccctctgctcgtatacggaaacgtaacttcctgttaattcctagagcatcttcgtttagcgaagcatagtctgccttattatatatcagtagataatcataaacatattgatcttctattctgacacttcttaataaacgatctagattatcgtagatttcgagagtgtagtagattccttcaataatgtcctcttctggaatcctatcccaggccagtttaacatctggtcctacaaattccgatgcatctcccgaagcagtattaataactctaaagttgctaacaacacttaagtttttagcagagtttagttctactgataacgttactggcgaacttcgtctaccattgatatctactgctcgaatctcgaagattgccaatccagcaggttctccaacaatttcttggatcatcctagcatttggattagtctctagctgctgtacgatatacggatcagcatggccggagtgaacaatagaatagtaaacaacgttatttgttaggctaggtagccaagacaactcaccgttcttaccaatagctccaacagtaccgcccggagttggtgtgtaaataaagtcccttggagggagaacgttattgcttacatcaggaatatcattaccactattatctacctgctcagagttaatgaatacatcttctccgtactcttgtagagtaatattaatcttgccttctctagagttttcaacttcatccactaggaaatatttcttttcccagccataacgatcatacgtaaatgcaataggatcattaggctcaataccaataaagtggtagggtagagaaaatgataaagttctagaatagcgagacttcttcagctctctatcagcaaaactacgtgcagtgtagtagttagtaatatttgcgaaggatagttgtaacttcttatctagtcccttatcttgttctttaaacacggagttaaagaacgtaattgagttagttttccaacttagtgcaggatctaggatagacgcctggacagagttaaacttgtttcgaccagttgtatctgatagttctaagtcaccataggtgtctaggaagttaatctccagcggagtacttgaatacttttcaactgttattctatactgacctgacaggttattaattgcaccaccataggactcaaggagaccttgcacgttcttaaatacagattcagcagtatctactatggtgttcatctgaactatctgtctattatctttagacatatcagtccagccagtgtatctccaatatggctgccaagattgctgataggattcatcaattatatctagaatcgaagcttcttggattaactgagtcaatggaaactgatcgatagtgatattagcaccgtaacgatctgaagttaagtagtccagagtctgccagataccattcaaactagtagcattagcaaccacactaccatctggatgatagatcttaacctttttaccttgaacttctgcactaacttctggaatctcagttctattctcattaatagtaaaacgaacgactgcatatgcagtatccagaagcttatatcgttcatcccagtactcagggccattaccataactgttttgaaggtagaaacctttctctttggcaatgtttactagtacttcagaagcagtctggtcagctttaccatgataagtccaaattctgatatcaccgttgccatcgttatacttatattcctgaccatgtacagaaggttcagaagttgacataccagatgcgatacgttgcatcgtgtcacctgctgttttcttagtaccgaaacaagtacgagctgtactatcatttgcatcgatacagatcatagggacatcgccgaagtagaaatctagaaatccatcaatttcaccttcacagaatgcatatacaacataaacaatgtttggattatttaactcagtatctgcaaatactggaagccccggtattttctgcactccatatactactggaaggaatttggctgcaaggttaaagtcaagatccacttctttagttacggtctcataatatttcttaagactataacttcttgatagaccgaataactttttcttagactgtaacttatatctttcttcctgcacctgatacttagccaagaaggaaacactcttgttagagtggaaaaagccatagtcttcctgatactcaggacgttttgcaccatttgaaggtactaactcaccagcaacaatctctagaccacggtgatcagcatcgtcagtataacgaccgtttactcgatcgaaatcgtagaactgatttgaacagttccacgtaattactgaagtactaataccggaagtagctacgttatctttgatacctccgccagtaatcttaccacggaagtatagaagaggtccatttgtttccggatctacaggaagaatgttaccatcttcatcaataacagcttggtggattgagatagttctatctaggaaggatacaccattttgaacgagctttaatacttcatcctcggctgtaccggtaatagtaaatgaaaggctaccaacggaaagatctctattttgtttatgtgttgttatagacttaactttaccagatctatatagtatgccactatataccacatccctgaagtagtcagttagatagatataagaagcactagatccagtagagctaggaagctcaagagtaataagacacgctgtttttattttattgtgtgatcttaaatactctctagctgtgtcaagaattttcttcatagactttccctcaaggaaagtgaaataccagaataagtaccgttattatttaacgtagaaccaaaactgtctccattcataagtttagttctgaataaaataccattgaatactggcttttcactacctgtagtagtaatgaatagatcaggataaatactcagattccatgagttacctgctgtagtaatagaagtgattttatatactttagggtgattagagagtttaaacaaatctccaggcttaggtaatccacgtagtgtccctttggtatccatcataatagtggaacctttttgaccagccggaatattcacagcactagtgtcaccacggactctaaaagcttcatattgaggcaataaaacatcaatataatcacccgttcttttataatcaagtataaatgagtctaattttgcaaactcatctgggaataattctggataagagatattaataccccaatattgagcagacaccttaatctccctaacagtaccattaggtaattcatcacgaatcatagggtcattgtctactaagttaacgctttcaaaacctaaccctgatagttctgggttcgtgtatgggtctggtagtctcatagttaatttctcctcttaataacaatattataataggattggaaaattttatcaagaaatttttatttttccataaagaaaaggaggacataaagtcctcctccaatattaagaattaccaagtgatttcagggtggttccattctcattaagagcctgttctacggcatccctgaaagcagcgctgttgctcgaagcaaaatctcggaagctcgccgcatccatcgtactgatgttcagcacaataggtctacccgatgtgcctctagatgagcctttaacctcatcagctggagtggccttcataggaaccataggagtaactacctcggtaccatgttcgcccatctggtagctaacgcctggatacatattaccaccttccgcacgcggaacaaaggtgttagcgttaccaataccttgatcaccacgcatataagaaagttccccagcattagccgacatagaaacgtcgacgttcttctggcgctctccaagtgttaagtagctagcagtatcaccaccagagtctccaatattagacataccagatgcagaagatgcctgagctaatgccatagcacctgctaatccagccgcaaccattaacggaattgagaatggatatggtactgcagtagccgcctgcataactgcaaccgctgtttgaatgataatttgcttcttagctgcatcttgctggatcttaagcttttcagcttctaacttcttgatcttcgctttagatgcctcagatttaccatcacgcttctgttctgctgcaatagcctgatcaatagcacttacttgctgaccaacactgtactgaatcattgaagacacagtttgcataccagcagctactaaagatgtggtatccagtgacccctgagagaactgaatcatagcattagttaggttacccatactttgtgctactgcagttgcttcagagtttagttcagatagtttagagatagcctggtcataagatgccattctattctgcatatccatattggctttatcatcaccttctagtccagtagtaggtgtgtaagtaccaccaacagaagaagtaacagcttgctgcatctgagcatcacgttgcatcttgagttgtgctagagctgccgaagtttcttggattttacgcttgtactcttcctgagcttgagcgtttccttttgtaatctccaatagactttggtacagagcttgctgttcagttaaacgctgagattcaccagtaacgttacgttcggtttgagataatcctaaagctctctcgcgcccactagccatttccatctgctggtcttgacggaacttccagatttcacgttcaatctgtgcctgagcacgtcttgattgttctgcatctttttgtttgtcgacctgcttagagtaccatgcgtatttctctttctcgatagtcagttcaaggttcaactgggctaacttatattgagtatctgtcatagtacggttgttaagcagagcaatctcacgatcaacaccaaggatcttatccgtgtagtccttgaccttcttctgagcttccatgttctggttagtgatcttgatcctttctaactggatcttagcaatctcaccctcaatcgccttgttacctttgttagtttccagtacacgcttaagagctgcttcctgttcttctaactgttgaacctccagacgtctaccagcttcctgtgctttttctttatccttagtctgattgtacacttcggcaatcttctgttgaaccgctaactgatttttagtttcgttaccagtcagttttacgtaaccagcaagcgcttgagaagcagttttcatttcacttagagtattataacctaagttcaaactcttaacatactcatcagcattcttaccagtaccggcagatagtgattcgatagtcttaattgtatcagccaacgatgcgctagtcttagcagcagtgttagtattctgagcaatgttctgaatatcgtttgctaagtcacttgcagttttcttagtctggttatatgctttctgttgttccgtaagccctttcagggttgccgagttaaagtcataaactgcatcaggatcatttgcatccttctgtagattaatctgcttctggaattcaggatttgccttagcagcagctgctccagcagcttgatacgcagatttccaggctcctaagttttcagtagagtcagcaacttccttatcaagacgctctacctgtagtgccattgcagcagtatcagcaacgaacttcttgttttcttcggaagcaccaagtgctgctgcacttacaggaacaccttgagctacagaacgaattgcaccagcagtaaagaagtcggcctgttgcatgcgcttatctagatcagcttttaacttattacgcttttctagggattctttatacatatcaagagctttattatatccggcttctgatgcctcaagccccagagccacagcgccaacgttactaggatcaatagctctgttagtctgttcctgtgctctagcagcagttgcagaaatagaagcttgagatgtatagaatactgcattaatagagtcaataactggaccaagatacttagcagcagcttgttgaattttacgtaatgcagcatcagcgttagcagcgaactgttcccacggagttgcacgtaatacttcatccagatatccgaaacgtttagtagattctgcgattactgcgttagcatatgcttgctgcttctggaaggtggatagactattgatattataagtaatacctgtgttagcagcgttaagctgtttaacatagtcagagaacgcatcattaagacgaatagtaacaccaagttcatccagaagttcgatttcttgtttagatacacctttgattacacggttaagtgcatcagtcatatctacaccaagaacagcagcagcacgacgagctactagaccaaatttattaagttgttcagcatcaaaaccgtatgcagaagcagaggatgcttgtctcattgcttcttcaaaagaaattgcataaccagcagcttcttgtagagacctagctagggtttgtacaggagtacccgtttgagtaccaacgatagtaccaaacttctctagacggttcaactgatcacccatcttcagctgttcaaacgcagattgcagaacgaacacgttagatgcaattgcagcatacattagaggtaaactaccacctactttagccatagctgcgaagtcacgagttgcaccacgagctgaaccagaagtattaccaattgctcggctagctcttcctgctgctgtagtagtatcattaaagcctctagatgtaccagataaagctctgttcgtatcatataacctatcctggactttctcagttgcagctgcaacatcgttacccataacttttactgatttagatacgccctcaaaacctgtttccattttatcagcaacttcaatcattgctaaagctaggtcatctagtttcgtttcaattttagccatagaggtggtaatacttgccatacccctacttgcttgcatcttcgttagactcttagctgctctatccgccgccctctcaatggaataaagagttttgggcatctttcctaactgttcattagtcagttcagaagcggcagcagcattctctaacgcatcagaaacactttcaatagattttgcagtacgggtagcccctttctgctttacatctatcagtagttctcgtattagcttatcagtcatttatttttcccaataaaaaaggctctgggcaaatcacccagagccaagcctcatcgtggaacgcccattggaggaaacttttactgagctcgagatcttccatgaggtttgatgttcggagtgcgaccattctgtttcccatgtttctcggctctcttacgagctgcgtctactgctttcgaatcaaatatattgatgatatgtagaacgaactctttctctatcggatccgtgatcccatagatatcaaataaaacacccaacgcacttttgtctttacctataaagataggaaagtcacccggtatgaaacaatcaataagactgttataaatttgcatactagtagatacgataggtggaaaatcttcgagttcaacaggcatcacatcaggatctggttcgatacccattgactcgcacattattaggtattgttctttagtcattttagatgccgaagacttgacgcatttatctgcgaatttggcaacggcatctagaagttgtttacgcttttgggctacgaaaagtgtctaagtggaacactgtctggttgatccaggaatcaaacgcagcagagttctgcattagcattacagcattatcgcggctaaaaggaacttcagtagatggatcagcttcagtttcaatcagcatcagcttctcaacatcaccaatagtcagaccagtccaacctttgatagcagaatcaacgaaagcttcaatgaacttgtcatcatcctgaacctgtaacagtgtaccattaacccattcgtcacgttttgcagaagcaataacacgcttagaagtggcacgagacatgtagttcaattcaagcttaaagttaggcataccagggtaggaaagcgtaacagagcgagtatctagggtaatatcttttaagttaatcatttctttatttctccaaagaagtcgattcttaccggatcagaatcagcagtaggaattacatcccactcaatcctgtatagatccgagaattgtaggc

SEQ ID NO: 13 - DNA, 154341 bp, unidentified
  source 1..154341: mol_type = unassigned DNA
  misc_feature 1..154341: note = the genomic sequence of a bacteriophage
gcacatggcggggtttctcaggctgaggccagacagattatttcaggagtgcttccagttcttcaacagatttgctttccagctcttgctgtttcttacgctggatcagctccaggataatctggttgttcgccttacgctctgccgcgtctctgctgtcgtcacgttctttcagcttaacgccgatgatgtgcttgacaacgtcgaagcgcagctgcagttcggagtcaacgttgcttttggtgccaatgaaatcttcttcatcggtttctgctgctttcacctgacggctcagacctttcgccatttcgttcagggcagtcaggctcaggtcccagacctgctcaacagacagcagacctttgttagactcgaagcgcagtttcatacgggttgctttatcaaacattttactatcctcaatgatgaatgggttacaatttcaaatcaggtttagaacacaactttcacagtgcggttgaaagaaccgctcaccttcacgaacacgtggttgcgttgggtggtagagaagcccagaccggacagctgctcagtgcttggctgtactttaatcttaccgcctaacatttcaaaaaccttgcggtgtttatcaagttccggcttcagatattcgttatagaaaccacgggtgccgacagggttagcacaaccttccaggatgaagaacacgtgcttgttgccagtctgctcgccgtcccaatggtttggtgagttcagaaccagctgtaccttctggaagacggaggtcttgatgccccagatttcctgagagcgagcgtcgtctttcagggtagaacggatgtctaccacttgtccagcgcggacatcaatcacaacagccagagtgcgatctttgtgcttcaggccaggatgcgaaaaacgcttggtctggcctttgtattcaacttcgatttcgaagcccatatcacaggtttcacgctggctgaagttagtgacatagaactcgtacagaccatcacgcagcttgcgttcatcgctgaagaagatgttctccaccggacggcggtttggatcaatgccgtccataccgttcatgtcgatgtctagagttgcgccagttgtcgaacgacggttgtgataatacacgtggttgtgaagaggatcgttcaggctcagatccaggtcgtcgttgttatgccaagccagtgacacacggaggaagctgtcgacattgccgcctgcggtcttcacgcgctctttgatggagtcggccacttcgccattgtacgaccagctgaagccgttgttccacttgaacaggttaggagcgcctgcggtggccggagcgatcagggacatcaggttgccaatgtgagagttttcgaccagcacttccagggaatgcgcctttggcaacacgttggtcaggaagtcgtcgatcgtgatctcttcaaccttgtccagggacttggtcggagtcttcacttcagacgccagctgagcaaacgggtccatcttcttctgagctgctaggtcggcgaacagaacgttgttgatggtcagatcgtcatacacggcataacggcgacctagtgaatcagtcagacccagcgcttcgacttctttctgcgcgttttcaatcatcgacttcgtgaccagcgcggttgggcgcttgtagttcgtcggagcgactttggcttcaaaggacttcacggcggtttccagatcccgaccttcattgaggtctaccagcagagagccaatcacggtattacgaatgccgtgaggggtatgaccgtttgcacggtagccagtgcgccaagcccacagagcgcgtttctcttctgcagtttgttcgtacagggtcttgttcaccacgaacgcctgcactgccgctttgtgctcttcaccgcgatacagagaattctggtcgatcaattccagaacgatttcagccgattccagagacagttcacgcaggccgcgctcaaacacttcaatcgcctggcggatttcacccttcttagaagcgatggtatctgcccgcagaacatagctgctcagcaggtcggtgtggaagtggttgtaggtgcggacaataccgtctttcatttcgtgattcgacccaacaccaactttcttggtgtcgttgaagtacacgtcgacgattgcgtgctgcttaacatatgctgacagcgccgcagcgacaacgtcgtattcgttacccaactgaatgttatcccagatagagatcacgttcaggtcggagtcgatggtgaccacaccgccgatattacggatgaattgtttacagcaggtacagtcgtgctcggtacgctcacgataaagcgggttagtgccagcagggaaagaagacagatacagatcccacagagcatctttatcgatgttggtcatgaacagaccagttgctgacatggccagcacgttattgttgacagctactgcgaaggacttaaaatctgacatgatgtaatcttcctgtttcagttcaaatgtgcgccccgtttgtcagggcgcttcgtttaagtgaggtcaatatacgctggattgagttattgaagaacgaagtaaagggaatctttattcaggtttcttcaaacagtccagcaaattgacggaaccacgtttgagcacgacttcatcacagcgctttttgtattccccaccgccgtcatagctgaccttgccccgaggtttttcaccgcgcccaaccgcctcaacacagcgggtgtacttgctcagttcacagaacatgttctccagctgcataacgttcatgcactgatctacaggctcttcagccgaccagaattgctcacgaacatacccatattgggaatacaccgcgtcctgattgtcccgcaaccagaagatgcattcttcatgcgtcatgccatctttgtcctggaacatcagatcaatccctgcgcgacagcctggtccagcaaccgtgaagtggttctcactgaaaggatatccaggaatgtacgtgaaatcaacccagatctgataggccaggaatgggccaagcccttcgatgtcgtcatacatgcgctggtatacttccagaggagtaccaaggcgcagcaagtcatggaaatagtttggatacttgttgacgaatgccttcagagaacggataacacgcatcggcatgtatggttcccatccctcgatggtatattcaccaggattctcttcgaccagcttcttggcgaccttgtagtccatctcgtccacaataccctggccaacgcgatacactttcaccatcatcccaccgaagcgctgctccttgtggttgacaaccagctcagggaaagccaggcattgcttcagaccacccgtgttgaaggcattggtgaataccttaccaccgtcggcctcgaacttctgaagtcgttcgcgggttgcatcaaggttgatcttggcgaattctttgatcgtcatcgcgccgccgatagcctggattggatcccagaggttgaacatgcgaaacatcacgcagttgaacatcttgtcggccatacccagagcatcgttgttgacgatgttgttgatcaggttaagagactgcctgtcgtgctctctccggacgttacagaatttaacctggcgtaatatgggattatcagtccaaggagcaggaaggcgctggacgtccttcttgacgtggatctgataacgatctcgcatccattcgtaagacaggcgggtatgggtcggactgagaaccggtttggccgactttatcttttcttcacggacaccgcagtacgggacgtccagggctttatctttcatggtatcctcttagaatacgaaaacagaggccattatagcctctgttgtttagtgaataactgtatgtcttaatcgatacgggtcagttgggtgatagatgattgcactgggctggccacatagacacggacgttggctttccattcaccccagatcaacggtagagttgggaagttgtcttcattgaaaacaaacacgggaatgtagctctcgactgtttcgccagagaacgcctggaagcccatcttggtgtatcccatgatctcgtcaataaaatcgaacggagcgaaggcaacaccagcgtgttcgttagaaccgagctggcctggaatggccgtacccgtcagaatgatttcagtgatctggcgcttaggctcggcggtcaacatatcagagaagtccggctctttgaaggttgccatgttcttcaggaacttgccagccgggtactctttgccgtcgacggtgatggtgtctaccactttgatgcacgcctgagggaattccccttcgatgcgcagactttcgcgtgggaatcctttgttgtagtagtaatccagtgctggcacaacttcaccttcattacggatgaacttgctcatgttagaggcatacacgcgctgtaggcattcgtcaccgtcgaaaccagcaatatgagccacgccgtcgttgactgttgtgatgtcaccctgggcatccatgatctggcgcataatgtctttgatgtcgacaacaacgggttctttcaggactcgcggagatgcagtgaactcaattttcacctcgtggtcgaaatacgccgcttccagcagttcacgggtttcttccagcaccagtttcgcctgattgcggatcttaccaaagtcgggcgatgtgacgtcgccctttgcattaccgaaagccagattcagattcacgttcttggaaaatgtagttgtcatgatttagcgactccagttattcgctttttgccttcgtaggccggatgatgtattttggaaccagtttccattcaggaacctgatcgtgtttaaccactttaatgcgagacatatcggctgcttcagtgacctgctcaggatgaatgaccttcaccatgttccactgctccagcagcttgatgattcggttcatcctcaggacatcttcgcggttaaatccgttgtaatgcccgtccagcataaatagatgcttgaagtggacgatataatacttgccacacttatgaagaatatggcaagtctgatacagagtatttggctcttggcgcgtgtttaccccaattcgactcagtgtttccttgatccccaggaatatacctggccgatcttggttcaattgaacttcaaccatacaatcaacgatgctggcctcatcgttgactgctgaaatattcaatatgtctagcgtattacgcgccatgactcattccccttttacaatagtttgaactatttagccttgcgcggtttcgctttggcgttcagctcagtgcgtctcatcttctcgcgtatctcggccaggacttccttcggcaagaaacggacgtactccgatgccttctccatgctgatgtagaagtactctgagagtaacttcacgtcaggatcaatcggacctttcttagaccatttatcgtagcgtttccgagccggaatggtgtaaaaggcatatgaccattgcatccatggagtgatagcatgtagcttattcatctgttgcgcagccactagagtgtctttgctctgagctaaaccacgccgcgtcataaacgggtcgaatcctttcaacacttctgggtcatcagaccgcaaaaggttttctttgctgctgttcagagcagccaggtaatcgaacaatccaagggcggccataatatcacttccacttgatgttgagcatgacattggtcaggaaaaacacagcatgcagccagacatcgccgacttgacggtgttcaatctgagactgaccacatacgcatactagatcagggatagactcattctgaaccaacatttgcttctctttatcctgtggtacacagaactggaagaagcgggaatagaagtcttcagtgatatagttctggttgtcggtcacccactgcttcatcccagcccagtcattatccttcaacatattcaccaacatgcccatatcggccgattttaacacagccagtgcacgttcgtcgatcttgccgtaagtggtgacgttatcctgtagaacacccatgatgcggcggttatcagggaaatggcgcttgacaatagcagccaacacaggagggtcatactcaacaccttcgctgcgaaggatttcagcacagcggcgcatgaactgaagtttgacctcatcagcctcggtctcattccagataaagtcgatttcacggcaacgagagcgcagaggttcgttcacacgttgcttggcattggtggtcaggatgaatgaacagttcttggagaccttctccacaatacccttcagcgactcctgtgccgccatagacagacgctctacttcgtcgaggataacgactttgcggccaccgaatacgctcacaccagtagagtactgaatcacgcggtcacgaataacgtcgatgctgttgtccagggatgcgttgatcatcagtggttgcttacaaccgatttcattacacacggccagggcggaggtagtcttgccagtaccaggctgaggggagtagaacagcatagacgggatgttgccgttgccgctggtgatgtagccatggattttagcgcggacgtcttgagggatgataatctcgtccaggttgtcagggcggtacttgttttcccatgcgtactggtcggaaacgatagtgatattagacatttcagcctcgtgtagaagaatcatttcaaataggcggggaacgccccgcccacacattatagcatcaggctggagattgattactcaatctgtgcgccgacgaagtaattgatcgtcgcgtcggatgattggaagttcaccatctgtagatcagcacaggcacgcagagtgtagttgccttcgatcattttcaggttggcaacatccagcggcattacgaagtccggcagcgcggtttcgcccagctcaacagtgtagttgttggagttgtccaaggtagtggtggttgcaaccaggcgagttttgccaccctgagcaaccaggcgcacagtcttgtgtccgagggtagagcaggcgcgggtcagttctttcatcttctctggagtgatgatcgcttcaaagtcaacagacggcagttcaatggtgtcagccgggacaaccgtgagttctttagcagaacgccagaattgcagctgagagctttcgcctttcaacaggatgtagtcctgatggaattcggctttggcacctttgaaggaaggtaggcgctggatggccagaagtttggtcaggtccagaatcgggaactcaaacgggaagtcttcttcgatctgcgccacggcgatcacagtagaagaatcattaatactgcgcagcatcttacccggtgtcagaacgatagatgggttgatggtctcaaagttggccagcaactgaagtgtacgttcggagagagtgatctcttgcatttgtatgtatcctcaaaatatagtgggggttcaagtcatgtttgacgcaatctagtatcgctgtgttttgtttatagaacaagtggcaaattgcgctacgcgttattaataaatgccttcggcatttatggactttattaaagataataacctttattaaagataataatctttattaatcctatttgcttcgctcataaaacaaatactcgttgttcgctaacgctcacaactcgtataataccacgccattgttcaacaagaaagcagtttttattcaacagcaaaattaatttatttggtctaaacatgcacgcgaaataatatgtatgtcatgttaaccaacacacgagagtaatatatgaaacagttcgtaggattatacgcagtcgggtgtagtaagccagacgccaacctcaccacagatcaatttaccacaggcaccccagtttatctgacacaactggcgtcagacaagaacttaccatcggagccgcgatttgtccctatggggttgatgacaggtctgaaagttggtctgtatgtcggtgtggtgacgtttgaaaatggcgtcgaagcgaaagttctgccattcaaattgggcagcgaagaaatgctgaaggatacgatcagtgaacacctgaacgcacaatgtctggcttctctggataaattgttcggtgtagtaactgatgaaggcgagcccacccccgcctatgtgaatcaagattaatcgtgattacccagcgccaccttcatgaactccacggggtggcgctctgccaggtaaaacttgtaacgctcatgagagtgcctgagagcgtggttcgtgctggcgttgtacgatgcatcatccactaagtcccatatccacgcgacgtccttagaggagtgctgacgcatcagacgacccaatgtctgtatgacgcggatatatgatttgctcgggtgtgccagtacaaggtggtgtagcttcttgatcgacactccctgctgcattgtcccgtatgatgccaacagggtgatgtcctctccatcctccatcgctttctgtatgcggcggcggtcttcgatcttcacttccccgttgatgacaaacacgttgggcttgactgcgctcagcatgtcatacacgaccatcatgtgaccatcaatacgctcgaacatgatggccacgtttcctttcagattcagtgccatcttggcgatcagttcgttgcgggactggtgtgtaataaggtattctatttccttggaataatccccgtctagaccaacagcatccgccggagtgtgcttcagctggatcatcttcactttgatgtcagtggcgtacccgagattgataagatcgcgagccgtgatgatcttatggtacgccccgaagtgagccaccacctgaagcccggcaactttggtgttcgccagcgtacctgtaacccccaggcgctggtcggcatagatgcagttgttcaggatgtaagacagtttctcagacttggaggtgtgcacttcatccaccacgatatcaccgaactggtggaaccattccttcggttgatcttgaatgccttgccatgtactgatgacgattggtttgctgatctcctttgtcgcgccctcaaaaatcagctgggtgttaacaacgggcttccaatcactgccatgcgcatactcttcgaagttgtcgtacagctgagtgactaggtggattgacggcaccacgataagcgtcttcagaggactttcgagagcttctctgcgccgcctgtagtaccgcgccatgacatacagaataaaggacttaccggcactcgtagccagttcacagacgcatctggtttgacgcatagccttggcgatggtgtcgtattggtagtcacgagtctcggcatcgatatattcgtgattttcggtgcggatctttggatgcagactgtcgatgaagtcacggatttcttcatctgggatgtcctgaatgtacttcagtgccggatccagttcaatggtgtatccgttgttcttacagaacttaaatacctcaaacagcagaccgatatcgattagaccagatgacttggtaaataggcggacaaccccgtcccatttagagaaggggttgggaacgaagttcgggtcttcgaatttgaagtagtcattaagttcttccctgatagaaagatctgcgatgcaacgcatgcggacttcgttaaccttaacaatctgaatgtctgccatacaaaatctcccaaggattatggggtatttagtgatccggccagactccgttttgttctttatccatgcgatgatacagacgaacacgctcaaacatcttagttagaatgtcatcacggttgaactcaattacggttggtagaggggaagactcgttggcaatcacgttgatgaggcgggtgatcttgacgccgaacatctgctggaacatgaccgaatataagcacagctggatactgtaatcctcgatcataccccgcgtcttcatagtgttcgatgtcttgaagtcgatgacagcaggtttaccctcataaaccccgataaggtctacacgacctgcaagaccaagcacctcgctatataatgggatctcctgagcatagatctttgtcatcttgttcaggtaagggaacagctgcttgaacatgaacatgtattcgccagccgcttccaacacttctttcattgggcggttctttagatacagttcacacgcaaggtgcagcttctcccctcggtcagcacagcgcatggtctcaaggtcagcggcctctgcgcccagcttcttcctccaagactcaagccattcatgatctccagtgcgtcccagcatagtcgtgacggatgtcagttttacaccagacggtgaaacgtaatgacgaccattctccgtcgtaacacactccagttccttgtaaggaagttcgtattgctggaatgtgtaatgacggttttcgaagtcgttcagcttgcgtagatcttggagggatgccattatgtgtgatcctcgttatacaccatcaatatattttctccactcaatagcatttttcacttcgtatcccagtttgttcaggcgatccaaacaagtctctatgaacttgacttttgctttttgttcttgtaacagaacagacaactccacatagtcatcgtctgctttgacccatgtatctaggtcagacttcagggggcgaaccttcagggggcgctctgcgtagatgttagggggtaactcccctgcatagtagcggcgcagatagagatcgatctggcggaagcgcccgttgagaaattcaagataacgcccctcgcgcagataatgccgctgtacagccatccaagagcgcccgattttcagtgagatctggtcaaggttcatgtcttctgggtccactgtgatcagcggctccagttcgttcatgatgtcctcggtagccattgtctgtagttgttctttcataaaatatcccagcttgtcaatgtcatagaattataccgcatttcgcggattagaatcaatcgccttcccaccagatagtggaaccagctgttggaacttgaaggtcactgtcgtcaccagctgaggtacagctgcgtctacgtccaccagtacgttgtccaaagcagtcgggcgggcttcctccagcacgagagtgaggccaatcggtcggttgaggttatccagcaattcaatggtaatgtccttgctgacaggcaaatccttgccgacgttgctggtaatccattggtggatctgtaaccatgatttccagtcctcgtctataacgaaagtaaatacgacgggatcataggttaaacgctctgaaggtatagaaaccaacacgtcaccaggagacggaccatcgatgccttcggagtacacccctggtatactgaagtcgtggatgttacgggttaggagtacaaggtctccgatagtcagacgccacttatcggacgccgcgaaattagggttttcgttcttaaattgtacgttggacataatagcacctttgctgtggagatattttgtgaccctgatgcgcgggatcagtagattgttgttggcatgctcgatgctcttgtttacgagctgtcgcatctttgtcacgccaataatttctgtttccgaactctggaacccagaagtgcgcactgtacctgtgacgttgtcggccagcgttcccacttgtaacaagggtatgctggacatcatcgtgcaagagttccagcccttccagaagctcgtacctttaggttgctttgatgagaacatgagcaccctcaagccatactggaagaccacaattcctctcctgcggcatggcgatgaagggaagattccatacctatcagcaagtatttattactctcagaataacagcatcattatcacttttaatccatcattccatgccaagctgaagcaacacatggttgggcgactggatacaacatcagatataatcgtgacgttcaagatcatgaatgactcagataaaccagtacgaatcgcaactcagggtgtgttcgttaacaacgacgcggttggaaatgggatgagtatctttgaagttaacccagggggaacgatcttgatcagactgagtaatgtgggtgtgaactccctgctgttggatggcatcgaaccagtgggagttcttccggcgcgggagcactgattacttcagcgcgttcttcagattatcggaaccaatgctgttgatgacacctccggcgcagatatctttcgcccactctgatatcacgttggcaaaagagaagttaagacacttaccaaccatgtcttggatatgggctaactctgctgcaataccgttcgtgatgtcttgagcaatagaggctactgatgcgacagcagtgtcgatggcttgagtaacttcagcagccagtgcccgaatagcatcaagaccagcactgacaccctgagctaccaactcagccagctcattcatcttgtttgtgatagttgtgagaacactttgcatggtgttgatccactgtttgccgaggttctgaataaccccaaatgcattattgatcagatcacagttgttcggttctcgacctatagacttcagggcggacttatacgacacagatgtaccgatgcgggaatatgcctcgttcactgactggtcgccatagttgttcaaagtagtgatgctgtcgttggctgagttgaacattgctgtagattcgttgagtttggctgtagtcaacccacctgccgtcagtgcttcctgaatctgcgtatttccggtgttagccagtgacgctgtagtcgccttaccactggtgattaacccctgtgaggcgctgctgagggacgggagaggattggtaaaggcgttgccctgcgatagggcgtcatagatctgtgcgttcataagaaaatacccccatggatgatgggggtatttagggatcatggtagtttgtaaacgaagttggaccagaacttacgaacaaacttcttgacataaaccattcggttggcgtattccccatccttcaggtcattgtaggtctcaatccctaccgcgcccaagaagtacgccgtgaagatgtaacagaacagattgatgacgacaaacatgatgtatctccgctgtgtatactcaaattatttatgatatgttacaaaaggcgcttggtcttcggcttacccattagagtgatatccacagggaggccagctttcttgcaacggttgatcatgtccaaagtaccagtagacgagccatcccacatcgcaatcggatacacttccagcttggtctgcctgacgagatccaatgccttgtctaacatgtcctgattgcgtttgttgcccatccctttcccatacttttcataatagctcggaggtattggcataggagtgatatgaacataattgatttcagcccagtcacggcaaatcttgtctacaccagaggcttcaccctcaatcagtgtatagacctcacgaggatccaagagttcgtccagcttggcgaataccttatcccgctcggtgattgagcgggaacccgtaatgagaacgatatacttcttcatagaactcacagcgccccaagattgccgattacgtacagggagcacagaggagtgcctgacgaacgcggttcgatcgtcatcccgctcaggcggatcagttccagtaatccgtcagtggtctgatatgcgcgtgtcgaaccgttcggtcgatatagctccagctcagttcgcccttcctttattgcatttcgaatgcgagtgaacacgctgtggtcgccgaacttctgtttcagaatatccagtttggtggtcaggcggcgcgttttgcgtggcttgcgctcactcggcttttcgaatttgacgatgtgggggatctccacggatttgttcagtttggtgtctgctgccatggtaaagtcctctatttgtaggggatagggtatgcggttaacataccctgttcaaaggtttagaacaaatcacagatcctgacactgatcgcagtattcatcgtatgtgaaggactcatcacacaggccgtccacgatcatagccgcttttgcttcagagaagatcgcgagagtgatatcattgtcatccaagtcttgacggatgaacggttcatcttcagggcgattgaagaagacttcagcaggttcgatatagaactccgcttcaagatctttgcgggtttgatggccagtgatccccatcacccactggcgcatttcagagatggtttccagctgcgggttgctcagcacgttggttttggttgcgtcgaatgctacaaagcctttaaaagtcatgatatatttccttcatttcagagtcagtgttgtgctgcttatggaatgaagtatacggggtttattgaagaagtaaaccccgtattcaacttttattgaatttatttaaaacggtcaggaagggtgtcgtgaacctcggcgctcagcaccagaaacttaccatccgtcgttgggaagcaatagtctttcttgatgtgacgcaaatgttcagctacagctgccacgcagtcatctgtcacgtcagtcttctcaccaacccacatgctggttttggtgttcaacctgccctggaatatagtaccagtgagaggacttgcgccgatctttttgataatcatgtttgacctcagttgttaatgcggaacagttgtggataaccacctggatgcccttctccggtcacgaagacctcgtaccgggcacctttaaccaaaccgggcaaattgcctgagtcgagtagatatcggattttatccatagtgtccatccaggacttagcaggttcagcttcagcctctccacgattgaggacgagttcaccttcagaataatacttcccgctgtccttcatgtagtacagcttgatatggatatactgaggggatgggaccaaacgccagccgtcatcaatcagatcctggcgatcattatccagggactggtaatcgatctcaccagacgccagaccatagctgcgcatgtagcggaacttctcaacacggtctttcacgtcagagatgaagaactccttcgtggctggactgatgaaaatgtatttctcttttgacatgatatagttccttcctttcaaagaatgatgtgttcgtcgatatcggactgcgttgcaatctcccagcggacgatgttctcggttgtgatgaaatcacggttcaggtgagaggctggcacatacaccaatgtgttgaccatgaagtagcgctgctcattgttccaggagtcaacataagcctcaataaggcacacttcgatcacttcgcctttcggcttcttcacagtctttttcaggtacatggtacaaccctcggatagtagacggggcaataatacctctcgccccgttattgaaactgttatccttcttgttcttcccaaccccattcatcttcccaagactggcgaggggtcttgcctgcttcgtaatcatcacgccaggcgtcggcgtcggcggctgaaccgccctggcttttcgcgactttgcacaatacgtcgtgccactcacggaaagtggagttggcgactgtggtgtttacagaatcttctttcaggctcattgtgatttcctcgattaatagagagggtaataataccctcatacaatctttgaaactctttatccagccaaagtcatattctgggaaccaaccccatcttcacattctggatgacatgaagtgcccagtttttcatggatcacatccagatgggtaaagatagcgtcgatgatatcgtcttggtcagactggacgtcaatcaccaagccgaccagaccagacgcggccatttctttatcttcacctttctgagcggttgggtaatcaccgtcgagttggatacggatgtttctgatattagtgaggaggttgcacaaacgctctttatgagaacgagcattgaccaagatttgggacacggattgtggtggtgctacgaggttacttgacatgatttgtactcctgttgtatggttgaccgtacaagcatacaacaggcaggtgtattgaacaacgcgggtattaaatcgacacgataaaggaattaactcggaatgtgtctagcgatcttcttgttgatgtcgtctagcagaatattcatcgtatctttgcagacctctacagccaatatcgatttggaattcatgaatgagctgaagataccagatttcaaacgcctcaactccttttccgcttcttcaatctgtcccatgatgtatttcttcgcgccctgtagctctatagcacggatgtctatttctttatcgttcatgatgacctccaattagtttggcacatcatatagcgaatccccataatgaaaaaccccgccgaagcggggttttgtaggaccagcctgttagattagaacaggcctttgatcagccctttacggaagtacacgttgctatccttggcgataccatccgcagtcacatagacctgcggatcctggttcgctgggatctggacgaatgggttagcacaaatcccgtagcgggtcttgaacgccatacgtggtgcgaaggtggtttcaccctgggtgcggtacatttccagcggtacatacggtgcgaagaagataccagcgtccagtgcggttgcgcctttgtatgccagggtgatgtattctgctactgcatacgggtcgatgtagacacgcataccgttagacagcacaccagcgaaggtctggccagtcggatcaatcgccagcttggtgttttcctgcagcgccggagcataatccagcatgccggacatcgccagagcggatgctacgttcggagaacacagaacacggttgcctttaccacgacgggtatcaacaccgatgccgttcgcttcaacttccagcatgaaagtcatgtacttccatttttccagcgcccaacgaccggagatgtcagtggagatatctacgataccattggtgccgaattttttgaagcgtactgcgctgaagttcatggtgcggataaactcacggttcatctctgcctgaatttcagttaccatcacgtcggacaggatgctgtcaacgtcttcgccgtggatcgccatcatgtcctggcgcagttcgtggctgtagtcagcgtacaggccgcgagacttcgcagtcacggttgctttctgaacggtgataccaacacgtgcccatgggttggtggtggtgcccagcagttcagcgtcggcagttgacatacctttaccgatggtggtggtagcagcgccggaaccttcgatctcagtctgggagaagccagatgggtcgccagcctgtgcagtgtcgtcaccagagtagccagaatcagcttcctgcatgaacagttctttacgggactgtgcggtgttggaaccgtctgcaacaccttggcgagcacgcagtgcgaagatctgaccgtcaggaccagacagcggctgaacgccgaagaagtccatcgcgatgttgaccggagccagacgtttggccatgtcgatcaggactggctgccatttgcccacagaggcgtttacggagccaggagcgtcggattcgcccaggtttttggcgttccactcagcctggttttgcagcagacggacggcaacgttttcggcagaaagcggctggatgctttcagattctttctgaagaactggcagccactgctcgcgcatttgttcggtaacaagtttcttagccatgatggtcattccttacattgatattcagttaagttgaaattacttagtagttcaaaatcaagccccctttcgagggctgtggctgctaaattagccgttgatgccgaagcgacgattatagtcggccaactgacgcttgatagattctttcagctctttgtctgtttcatcttcatcgtcatcttcatcgccttctttcttaggctttttgccttcggctttaacatctttgttgtcgtcatcgccgtcttttccgccgactttgtcctggaagtcatcgtcatcgtcatcgccttctttcttcacggacttaccttctaccaggttgcggaaggtgtgtacgcgggaagcgaattcgctttcggtggtgaactgcaccgcttccagcagattgacaaccgttgctttcttggtatcgaccataccttcacagatacgggcgatcacagagtcacgcagagtcgcattcgcggcttctttgatttgacggttttcgctttcagcagccgcagcgcgttgttctgcttcggccaggcgggcagtcaacgcagcgatctggccgttttcgtcggtggcaaagttaataccagcttctttcagaacaccagtcaggccagtcagcagattttcagccgcttcacgtttgatctgagcatcgattgcaggagcgttcttgttagcccactcttctacaacagcattcaggaagccatcaactttggtcgcgatttccatcaagtgagactctttcagctgagcaatctcagcctgatgagcttcaaccagacgcaggcgctcaatgttggcagcgttttcggtttcttgaatagcggtcaggcgagcggcttctactttagattccagcagaccagacactttatccaggaagtcggtgctgaggccgttaacgccctcaaacagtttttgcaattcaggtttcatgattgtttccttctgaacgattttcagtatttagtgaggctgaattcagcccagatgtttcaatgcgatatcgaggcggcgcaggaagtcgtcttctaactgaatattggttttcaccaatgaatcgaccacatgccccttaatgtccttaggaacccaaattcctgaagattcatcaagctgccattccacagattcgctcacagcctttacataacaaacttgtccagaaggacggtcgactgcatcaacagcagtgagcataaagccgggttgaacgtcatcatagccgttcactgacttggtctcaccaaggccacgtgtagacacggccaggttgaagtctgcttcagccagagcacgaatgatctgacctttcggtgtattcaggatccgcgctcgaccgatagcgttggtgccttcccagcgcaaagattcggttttgagtgcagcgtgttcgatatcggggaaaggataatccggatgcttgagttcaccgattgcacgacgatcctggatatactctttgtcgtatgcttcgacagcagggataccaaccttttggagatcgtagttgcgaccattacggttcacctggttacacatcacgaatggaccttcgatgtacatggctttgccgccagtagccgtggccgcttcaccaatctgaaggtctttccctatcgcagtgatctcacgcaacagtttcatcattcgctccttaactcagccccatcatacgacggaacttcattgcttttttcttacgacgctcgattttgcgctggtatcccatacccatgcgtttcttggctcggatcgccttacggttgcccagcttgcgagtacggcgctcactggcgaccatcacctcacaacgggaaccatccgcagacagtttgaaaccaggagcacactgcagacggcgacggcgtttgccttttgcgttcaccttgtcaatgactttctgctcatccatgcgggaagccaggaaatcagcgaacgttgcaacttcttcgatttccatgatacattcctcttactggtcgtcgccgaaaggacccatgtcttggctcagggagttcaatacatattcagtaccctgctggaccagttcttgggcgcgagcggatagctccatttcgcattcagcagcggcatcagtatcaccagcgatgattgcttttaccagatcgatagcagccatgttcatatcctctaaatgttttctatacttagtcgaattattcttcaccaccaggagggttagtcgctgggatgacgttaggtctgaatttcagtggactgacttccccgctgccgaagccgccggactcatctgcctgtacttcaggatatttgccttctttcttctctttcgcgatcttctcttgctggtctttgatgtcttcatcggacatacgcagtaaattgcgttgagcaaaatcgatagagaaaagagtgccgatatatggttcgatctgaccgagagccgccatacgctgtgacaagatttcgttctcttgttgttcacggatgaaactgtcagaagtgaattcgaacttgacgaacggcttgatcttctcattccagtcggcctgatctgtaatgcctttcaatatcagctgacggcgcagaagttccaggaagataccagaagaataacgacggcgcaggctcgcacagaacttgttgaagcgcagttcttcctgtgtgatttcagcaagattggaaccaccgatgttgatggaaccttcctcttgcaggcggctcttagggatcatcagagcctcgtagagcttctcgcggaagtataccacatgatccatttgacccagttgatcaccaccgcctacgttggagatctcggttgcgttctgcccttcgcgacgtggtaaccagtagtcctcagcaatacccatcaaatgagtgttgccagccaccttaccagtggtgcggtcatacgccagacggttcttgaatttacccatcatggcttgcatgtattcttcggccgacttcttacccagcgtacccacgtcgagatagaacgctcgcttctcaggagcacgtgtgatcgcatagatcaccgttgcatcttcagttgtaacaaggttgttcaggggacggatagctgggttcagcaggctgggtacaaccccattcgccagaggctcttcaccactgtccagatacactatgctctcatcatcaaacaccagctcttgctgtgacggttggaagttctgagacgttccggactggccagtgaattggttgcggttgtagttcgggttgtagtagtattgaagttttacgtcattgatgacttcgataccgtcgcgcatcgccttttgaacgatgtatacgggacggatacagcgtgagtccatcatgatgagtttggcgatacccgctttcttgttcttcgggtccactacaacgtggaatgcctgacggccttcaatataccatttgcggatcttctgatacgccgtgttgtcaaagtcaaggagatgcatgatctctttgaatgcgtcagtgatcttctctttgacttcgtttgtgataccatccaccttttccaggttgatggttacaggagtctcttcctcttcacaggtgacgatgtcgttgacaatgatatccacagccttacgaatctcaggctgctgagccatagactggtactcttcgaccagctgtttgacgttgagcaactcattctcaacaccaacgaaattgaatgtgttcgcgccgccctggaggatgatggaaccatcctgagaatcgtccagcgcaacaacagtcgcttttgaaagcaacttctcttcttggttcgtgaccatcttgtcggtatcaatcggcgcttctactttgccgcctctgccgaacaagccgaagaacccatttccgaatgcaccattaccgaatgccatgattaagtcctcaacattttcttgtaattagtgagggggaataaagatcccccagcactgaggacattagagagacttgtctgagatggcctggaagtaacgcaggtcaacagtgaactgagtataagagtccattgcagacatgtccagttccagctgaccgaggttctgaggccaggtgccctgaagggtccaggtcttggtgacgttgtcattcgcatccaacagttccatgattacatcacggaaataatcatctgggttagcagacgcacggttgttgttgctgccgttgatgtactgctgccagacttcgaatgcgttgtacggggcgttgtccacgacgttgatgaacgtcacaggcagcgcctcgaaacgacggtcgcctgggaatggaagttcacgaccaccccatgggacgagtatttccccgagctggcctgttggggtatttgtggtcaccgccaacagcgaaacatcacggatagtatcgcttccagccacgaaggaagggaagttaacagtcacacgccaacggtgttggcgctgaacgccgcccccgcgtgacatagctgctctgaattcattaactgtagccattatagattctccagaaagagttacacaattctaattagctgccaacccgtcgtgttcaaacgctctgcggtcgcagttttcctatgatacacagacggtggtggaactggaatacccttgtcgatgtaatcatagagtgctgaatatttaagtcccaacctctccacatattcacgacagttcccgtggatttcgtgttcttcgccggaaggagataccaatttgaatcgcttggcgttggagtttttggatccgattctgctctttgcaaatacagataaactcttcgagaacgaacgtttgactccggtcttacaatgtatcagttcccctgtagcccaccttgggtcatcacagtcaacaagaccaattcgctctcctgttgacgcatcaatagcacctgtctttccatagaatgtcgcaccgtcaccaccccaagttttgttgtaccctttcagggacatgtgggtgccatgctgcttaatcaatatgatctctaattctttcaagtctttcagggacttggtctgggctatcacctgtacagaaaatgattcttctccatatttgtggatagcctgatgaacaaagtaaccagagccgttttgagcgctgttacaatgttcccaccacctatcgatgggatcacgcgtggtgatcccgatataggctttctgattgactagatttgtaattttgtaaacacttccgatcatttcgatgctctctcagtaaaatcgttccattttaacccgcgagagaccattgaaatgccctccgaagagggcatgaggggtaaatcaagaagcagcgacgataccaccgccggattcgatctcactgaattccatgtctggacgcacggaagcaaaatctaaaaatatccaatttatactgtactctggtttcagccagatacccgcgaccatctggttcgcagcgataacatcagcggtgttgttgtcctcgtcacacttcaccatcccgtcatagatcgcgcccatgttggccaactggcggatatatgggcggacagcgttgctgaacaacccacgagtgaatgcatcgttgttttcaccaaggtagtatttggcgatggctgcgatgttctgctctgccataatgaacagaccacgaacgttgatgcggtcgaacgcagatgggcgggtcaggccagtcttgtcgccgtacaacacgatgccttcgttggagaaggtgacgatgctgttgatctggttgcgatacagcacagcacgctcatcagaagacgcagaccacgccattcgattatagttgttgtatttaccacggttgtggaacgctggagacttgtagatacccgcgatttcaatgcttcgcgcccaaacacctgcggtgccaccacaagccggaatccaacgcattttgtcgttgtacttgtcgtacacatacgcccagttgtcatccatgaagaagtaggaggagtcgcgaacaaggctttcacgccaggccacaacgtcatccatctcacgaccacggtttccgacgaccgtatcgcgaagaggagacacgaaggacactgtgtctttacgctcagtggacaggtcgatcagtgcctgctgctcaatcagttcttcacagaaaccgaacactggcttggcatcatacgcttcggcgttgttcaatgcctggatagccgcaacacggttcccagtgtaatcgtctacaccaccttcgagttcaatgacaccagcagccagggtattggcgaaggtgtacacccaatttgaggtgtcgttgatcacgtctttgaagtacgcattggatccatcagatttcttagaaccctgagcggtctgcaccagttcatacttctcgatgatcgtaccggaagcaccaacagttgtgacggcagcggtagcagtcagaccattcgcgtctggaacaatcgcagtcgcagcctgaggaccgattgctttgtgagtgacggtgacggtgttggacttcacgacaacagaagaatacacgtcagacagggacgtcagcgcagttccgatctttgtcgccagagtcgccggagtgtcagcgtcagtgtacgccacggcttcaccagcaacagagatggaaccagcagcggtggcagtaccggatacagagatacgatcaacctgactaacagcgccagaagagtcggtaatgcgacctactttgtcaacgatggcgatatggtactcgccagcctgcggagcatatgcgaagttgttacggaattcccaggtcgggaacagcgcagcatcacagatgttcacagcaatgtcgttacccagagagccagcatagcgccctgtccaagtaatagacgcagatggggacgcagtttcgaagtctagtttgttgcggataaggattgcagtctgacctttggttacagcgttgcgtgccgccggaccgaccacacgggtcacccatgcaacagagctgtaagacaggaagtcagcaatcaccaagaagtcggtggcagttgcatcgtttggcttgaagaatttcttcaccagaccagtttcgccaccagtgaccaacacagggagttctgcttcaccccattggaatttgccgacagtcgcaccctgaacaacaacggatggagacgtctgaagcgtggcatcacgctcagtccactgtacggacggcgcaacgctgaagctttgagttgccataatcttattccttctctgtagagtttcgctcaatttgaaagatatttagtgatcaccgtctcagccattcttccatagacataccagagcgttcatcataaacctgaattccaccgaaccctgagatgttctccacagagtgaggatctggcgtcgacatcatacccccaaatggtagcatctgagattcttccatcgcagacaaccgtcctctcatgtccacagagatatttgaattggtgagatcactaaaccattcttgtttcaccgcccatgcatacaacacgaggggcattacacagtcatcatgacaaccatcatcggcttcataccttgttccagtccatacgaatgtactgagttcatctatcgtgtcctggtcatctatcaccagcatttcacgttcaatcagggctttcaggttggcacagccgtttgtgcgcaccttcttgttggtattgataccaggttcagggcggcgaccaccgattctcttgcctgtacccttggtatctgttgtggtgaagatgatctcgggatattcaatttcctggtatagaattgtgattacctgaccacccacgtcgttgttggtctcaactagcatcgggcacgttccatacttctcacccatatcggcgattgtgtacgcatacatcattggaggtatcgtgttatttcgatacttggctgcgatcttgtgaggatagtctgtgatgtcgataatggtcagcacagaataatccccttcgacacccttgcctgtatctgcgatacccatatagatgcgcttaggatcgtagtcgtgataaatcttggtgaactcgttcggctcctgatacagcttcgaggtcatcttgtccagacacttggcaggtatcagtgatcccacagaaccacggaacttaatgccaaattcttgatcgaaacgtgcatcacccagcttcgccctttgtttggattcccagtctggatctttggtgtacgttggaacacgataccatgggacctcggtgagtttgaagtcgttgtattgtgggtgttctgggttcgccttggtgacgatgtcgtagaacaacccgcgctgacctttcggcgtactggtcagaatacaacgtgaagtctctgcagatgcaatcgccgggaatgtagactcccagaattcaaagtcgttttcaatgaacgccacttcgtccacatacaggagcgatacagatcgaccacggatggagtcggaagatgtcgcataggcgtagatctttgatccgttttcgaactctatcagcgtggaaccgaacttctcacaaccctgttggaggaagaatggcaaatcttgatatgctttgcgaatacgatctaggatttcaatcgcctgcttctctttgttcgccagtactgcgatctctttgtcggagtggaacatcgcataccagagcaggaacgctgccacgacagtcgtgttgtggctgaggaagccgttggtgtagtagcgctgatcactagatttcacctgtaggtcatacatgtgatgcgtctcaccagtctgccaaacctcacggatttcttctggaccttctgacgtcatgatgtatgacccagcattcaggtctttggcaaatatctccttcatttccggagtgaagaatatatgttcgtcggccacgttaattcgccgcccagtaacagtcacaataacgaattccgcatatttcttcgtcttatgcgctgcgataaccggaacccagccactatcggattgcacaaagtaacgtttgccgaagcggctgtccacgaacttgtcatggttgccaatggtattcagcggcacagcgtggttgacgtcctcgaagcggctgtgaagctcccctatggtcaggagcaactgctcttggctgagagtatcgtaaactgtgacaagcgtgtcaccttttacacatttcccagactgacgagcctggacgaccgcattgaatcgatagtcctggaagtcatggaacaactgcttctggtaatcgtgcatgtcaaagaggatgaagcctttatcgatggtcgtgatcttgtagtagttggcggcgaagtaatgggcgtccatcgcacactcgacgaactccgattcttgttcgtcggttagcatcaactccacacgaggtgcacgcacagacggcttgcgcatgaacgtttggtccatacgcagtctgacgtcttctgtcttaaaccccgtcttgagcggggcgtattctacatcacgcttctgatacgccatcgtcttcaccttcttccttcggctgcggctcggcctgaacgtcgattacatcttcttcgggatcaggtcctttggacgcagctttcgctgcagcacgttcttcagcacgtttacgggcgtcttcgatggtcttcagtagatcacgggaagacctggcctgtttaccgacgttgaccgtggttgtgccatcaggggacgtggtgacctcgacggttgtttcgtctccaggaggtggctctctgtcgcccgtgaccgccttgatagttttttggttctccatcaggtctttgttcaggccgcgcatgagttcacccaactctttgaagactgtgaaggcacggggtgcttcagtcgtcgtcgcaagtttggctgcctgtcccatcatgaacatcgtggcttcctgcatggcataagtcgtgtcacggatgcgtttgtagtcggtggtggcatcagtgtcttcgaagtctggaaccttagactccttgggcttcagctcttctgggtccaatgaaggaggaaacaccacaggctcataccccgcaggcttttcacccaaccattcgcctgtatccggatcgtgatcttttccggccataggcgaggtcttctccatgacttcttgagcgacctcatcccgcgcttggatagcactgagggtggataataggcgttctgacatagcactcataatcaatctccaggatgatgtacaccgtctttgtcaacacggaaccactccggcagttccgtccacggtgttttcaaatcattagacatttcgataattatctctttgatcccgttaggatccccgcctccctcgttgtccacccaatagtcatatccgtagatgaagccgctcagctggaacatgaaggagcagtcgacgtgtggtgaatcagaagcatccccttcccagttatcggacatctggtggctgatcagttggatcttgatcttctggtcttgctgtagtgtatcgttgtccttgataccacagtctagagagggagtgaataccgaataaacctgctctagcacctgtaacatctcaactaatttcttggttcggatattgtactcaatatcgataatcagggggattcgctgcttcgcccctgctgttggtgtcgattgtcgattgtggtacgtcttcgtcacctgtttgttgatctcaaactgaccaaaagagaaggtcgcaaatggaagcatgttggatggcacgttcctgttgaggtcattgcgtctcccgatggccatgtgtaatgggacttccataagaccacgctctgtgttcaccttcagatcagacataatggtggcaaacagattgatgtatttcatcaatgaatcatggtagaagtaattttcaaatggtctggccatgattattctccaaagtcgatcttcatcttgtctgttgcaagccccttctcaagatcatctgctaaagcattgtcggtctgcagagaagaatccttgtacacgtccggttcgttctcttcgtccaagatggacagacgtttgtcgatatcgtcgatctccggaacgcccgtatcgaagttttcgttgccgtactggaacaacgtgcacggcagagagaacgtataccatttgccaaattgcatgaagtcttcatcgttgttcgggttgttgaccttgaagatcttgttcgccagtggtagatagatcaggtcaccttcctgaggttgttgttcaaacccaacaccgttgcctatcacctcggcaaatcggcggcgcgagatagagaacgtcacttcgtcttgcaattggatacccccaaacttctcccacatctgggtgttgaagccctgataatcctgcatgtacgcttcgatgtcgaacgcctggtcgaacctgtggttagcatcgttggtgataggaaatttttcaacgatggaacggggtatatacttgatgtctatcccgcgcaactcaatcatttcctgtaccaaatcttcaatcagcttctgtgtgccttggtgattggtggcgttgaaatatttagaagtggccatatcgataccctcaattttgaaggtatttagtcgaagtttattcttttgaggaatagctcatgcaagtggaagacattaaagaagttcgcagcggtcgtcgcgtccgaatcatctgtgtggacgccaagattggaggtgatgattacgacatcgtcggtctggtgaaagaagtagatggcacagacttcattgagtggtggaactccaaagacaagacagaagacggtctgctgcgtggtagcggcaacggaaacctggatttgaaaatctaaaagaagggcgggttcccgcccttcttttaccccatgtagaagtcgatagggtactgctggccagtgcgcagttcttcctctaaacgctcgatctccgcttcagcctcactgaacatactatcgccatccagctcgataccgccagggagacggatgcctcttgccttcttgagcacttccgcccagcggcgcttgaccaacgcagttgcatatgccttcagccacatatcattccatgcttcttcattaccctcaacctctgggtcgatgttctggaagcatttgaacgccaacacctcgtcctttatcagggcgaattgtgggtagagtttgcgctggaatttcttgtaaacgaaggtgcgcttcacgttcagcacactggtgatgtcagacaaacgctgttgcattgaaacatagtcgaccaagcggatggaaacgagggcagcctttggtaccaacatggcttgggccatctgccattgaggggttgcccagttacctatcgattcaatcggagggccaacgatgacttcaaccacgtcgtcgatgtctttggggaattcgatgtaaccgttggtgatagtttcatcagtcacctggtgaacaaagaatgcgtcctgactgccatcacgatgatactcccaaaacttctgtagagcatcgtctacagcatccgaaacttgcgttgggtcaaggttgatctgaattacaggtgcccccaatttcttgagaatgtaattcataaatcctttacgatcaacaatagaattaacggccattgccattccccttgttgctctggatatcagcgacggtgatacgtaaagtgcgaacgtcgtcggatagactgttgctattgagtttcaactcagcaacgttctgcttgacgtagttgacgtctgtgtttaacacagcaatcttctcattcatatcgttcaccttggtgaggattaggtcgacattgttggagtcacgctcaaccacatcaaggcgattctcaaatttacccatcatccaaacaaccgagccaacagagactatcgtcgccgtcagcaccccggtgaggatcgctttcacatcgatcacagtgtcagtttgggttgccatcttgacctcctgacgggagttcaatcccgaggtgttccgccatgagttgtaccatcgctgtcagttgatctatttgcgctgcctgcgctgcaatagttctgtccttttcttcctgatttcgacgagcgttcagtgctgccaaaccggcagcattgtctgtgcagatgatagccccagggcaagagctacttctcatcatcgatgcatgcccttgtacttttacaccacgcatgataatatcctctgttaatggcggggcaaccccgccttgttaatactacttatgccagagcaatcaaacggaaatctttgaatgacggcggtgctatgcggttgcctctgaccagcaggcggatcttcaggccaacgaaaggattggtgctgtctacagtcttgtcatactcatattcgaagaatgcagaaccgtcattgaccagaggggatgtcggtgtcacagtttcccatgccacattatccatctcctgacctgcgcgcagtagtttaacctgcacagtcattgaagactgagaaggcagcatcgcgccgaagtattgcttcagagtggtgcaagggttatcgaatccgatatccttggtcacatagctgaacacatcttcaaacggatccacaccgtaggtgttgaagatgatagtgaaatcatcaccgtcgatcattggagccgtgtagacattactctcattgcgagtcatggttgcacgaacctggaagtcgcccacctgacgatagataccttccgtcggcagagacacgtccgtatcggattcgaactcgacccaatcagagaatgagttggaggtcgcatcgcgatagcggtattccagtttcaacacagatccttccagggctgaattggtgacgcttgcgtagaacatgtctaccaagtagttgcccaggaaagaagccgcttcaccaccaatctgaccgtcggagtcggcgttggaactcagaacgaatttgaacgtcgtgaacgtcgcatcagtcacagtgtgttgagcgttcagttgctcaggagtgaaaccacaaccacccgtcaacccagacagagtaacactttcacccgcagtcagaccatgccccggagcgtacacagtaacagttgaagaaccattgacacatttcacggtgttcagacccagagggcggatcttcggaccgactttagcatcgaaggtcacgatgtttgaaccagcggagaagttacagcgatacacacggaacttcatatcggcagtctggtttggagtccaggtcgtaccatttgaagatgtgaagaacacgccagtgtacggctgtttggcaatgaactcgttggtcagcaagttcttcttgcccatctctgcgatgtatgcgttgtagtcctgagtgttggccaagagaacaatcgcgaactcagtttgcgcctgcagatacacaggataatcaaacttgaacatcgttggtacagaagagtctgtggagacggaaacttctgatggattcagagtcttacgagtgacgacagtcgtcgctggcagaccattgctcatctcacggatttccagagtgatcgggatatcacgggacttggtggagaagaagacttcaatcccttcgatgtattcgccgccgatattggtggcaaccatgaaggactgggcgataggatctttccacttcgcgacttcaaccgtctctgttttgttttccgtagacttggtcgcagtgtatcccaggacgcgggtgttgacataagtcttctggatgccctgtttcttaccgaaggacttatgaacagcctcagcattggtcagggtatcatcagcagacttgctgtccacaggactgtcagtcagacggaagacgttgtcaccagtgttaaacttgatagtctcgttctgaggaaccgcaaacacacctttgatgttaccgttggcgtcagtattcaacgcaccgcccagtacaccaccgtttggggtacagtacgcgctcacatcacgtccagagaagaacggatacacacgagtgaacggacgtagacctgtggcttcgaagttgatgttcgttttgcgcatgtatgggattacctgcgtttcaacgatctgctcgccagtcagggtggtggtcgtcttgtcggtgtacgtgtacgtggtgacgtcacgggtagacacagtcgtgcggtagcgatagccccaccatacaccacctgcaccatgcggttcccacacacgctcagacacggacacagtacgccatgtaccatacacagaaccttctttgatcgcaccacgggtgttgatcgtttcgttgatcacacgtggagtaacatagtagttctcaaaccagtaatcagtagttgggttcagtttcaggaatccttcccagttgaacaccgcatacgggttcacgttgatggtcgtggttgcatagtcctggcggacagagatctcacgggtgtaattacatacaaccatgccatcctgaacgttgttccaaccgaccggcgtcaggtcaatcgcgttctgctgaacaaacgggcgcaggcgaccattgtcagtgtcgattgaacccacccagtctgcagacaaatcgtcgatcagacggaagtctttgaacgggtctgctgcgataccgttcttgaagcgcgggttgccagtaatcgggtcgaacacctgttgtgacatcgccgaggattccagctgagacagtgaggtgtaatattcgacattggagatacgggtctccagtttaccgatatcgcgcatcgtgtagcggcggttgtcgatagtacgaatctggatgtcgtcaatgttggccgtgtatggtgggatcatcaattcatacaggcgcatgccgttgtctgggatcgcaggggaagccaggttgttggaactcacaccacgagcaacgttgaacacaccgttgtctgccagatacacagcatcaatacgaggcagatagtactctgcatctaggatgatcgcggtgttcgggcgaaccatgtccgtgtcagacgctccgctggtgatcttgggacggaagtccagactgtcggccaacccatacacagtaccagaactggatgaaacatagttcgggatgtctgggtagttgatggacgaataggagtccgctgtgaagaaatcaccagagctgtgagcgaaatactgatacaccaccgtgaacgtccctgaaatggctcctgtggacgatatgaggttagaaaggtagtatgcagcatcacgctggccgccgtccagagtgaagttagaggtgacgtcagcgccatttgcgttcttcacgctgaccagcttgtagccgtcgtggttcccaagttgtgcgctggccgccgcagtaaacgtcacagtctcggtgacttcagtaacagtcttggtcttgatcgtcgctgtggtgcggaccatcaatgccaacaggttgatagactggttggcgtaccccgcgcccagggaaatctgcagtgctgaaccaaccggagtaccagccagggacagtcccgaagagatatcaaactgagctgcagtgccatctgctttcgctgcagagtacagtgaaaactcagggctgaagctgtaacccagaggagcagagattgagcctgcaccagcggcgttcaacgtgatcttgtttgaccgcaggacagtgtagttgatgtcgatggtgcctgtaggtgctagagtcttcacaccaaatacaggcagagggaagatcaggtcaattgctgaactctggctgaactgattggactccagttcacaagagaacatggttgtgccgctttcttcataagcgactttggtcaccgtacccatgtccccagtgacaaccaggtcgcgcatatacagacggaattcagtaccggagcgctctgccgaaatcagcagggcggtggcctgcacatcgctggatgcgttcaggaacttgtagcggattgtgcgggagataaccggaacccctttggagttcttggacaccagatagttgccagtcgaaacagccacagggttgttgttcaggatatcagtgtcacgggctttgtcaattatgaccagctcttcgccgaggttttcgatacgacgaccacgaacgtaggatatccctggcttcataaccgccacgaatttgctttcatcaccaccttcagccggagtgtaaacgccgccgttgttgttctgtttcagatgttcgcgcaggtcgatctggtgagtagagacgttgtaatccccgttggtctcataggtacgctgagccatggcgtcttcgaggatgttgtacgttgactgggtgaccatggactgaatgcgaccgtctttcacctttgccagttcaacgaagtcggccacttcttcatcataaccgtagcgagacaacacgaggtcgacgcgcaggcgatgcgcaccaggggctttagagttcggagtaccctgagcattggagaacagactttcatcttctgcttcggtcacgattgtttctgtaactttgaagccaatgcggtgagatgtagagttcgatgcgttgtctacgatcagagtggctggttcaacatccaggaacataccacgaacgaaataaacaccctttgtcatgcgagcaacaatcgaaccaccaacagtatcggccacaccatagccgacacggatgaagttatcgttcacgtcataggtgttgaaatatagattgtcgccagcttcgaaaccgtctgaactaccactctcagtcatctctaagatggtatacattgtatccggctcagctggataacgttccagggacaggacgcgtgctttcgcattgttgtccttgcccagaacatagagttcggagataccttccagatcagtgaactcactaccaccagccagagtgaacttcatggacacagcagtgttggtgatcgtcaggccgccggggataaccattgaaccgtctttgaacagatggttgccaagtttctccagttgatcctggaagatggtctgcatctggttcagttcacgcgtctgaactttgataggtgccggacggaatagaatgcgcgaaaaacgcttctctggattccagtcatcccaatatgggcggcggttgaggttcatttcttgcattttgatgctccatcgataggtgccattatagagatatttagtatacagccaaccgaggaatagaaagaaataagcccgaaggggctttgattatctttctgcggttatggtcatggattcgagacctccacattcttcaggaactatcgcagggggtgctggtacagctagagaatggagaacacaaactagacgaaccaatggaactactgtggtaggttcggatgctagtgttaaggtacagggtacggacattgctaatagggatagcgtactagctacttacacacttggttcaacagaccctttcatggtggatggtattcagttgggtatgctcaacatctcagggcaagtaattaccttaacagcagtatcggttagagtaatgcaaacagtaaactctatataaaaagtattactaatatgtaaaaactaaccccgcctaagcggggttattgttacttttaagatattacattacccatataatcctgccactgcccgtaagcgtaatacaggatttttctcgtggttgggtcagaccagtgagttccagttactgggcttgttggcctggttggtgtgaataatattgcaggtacagtggcgtatttagctgaattgttgtctacagaatcagatgttgaaacgtaagcagcaacgccatgtaggtcaggtctacgttctatgccccatgcaccaagtcgaggtccagttgcatatccaagatttttatctccattagacccggcaagaataaaaccaccgaagcaatcaaacagaaacgcaggcggagtgtagtttttagcattctgagctatttgctgcccagtatcaccaaacgacccaatgtaggggcgaataccaccgtgagtctgcttaaccccatcaaattcaacgaaacttgatgacaaatcagaatctatagttggttctataaagtcgaatgtatcatcgcttttaatgtctttaatcctcacacgactttggtatgttttatagaactgagctgttagtgctttaggagctgggtcttcaacatgaacttttgatatatctacactactaccaccaaactcaaaaacataagaaagcgtagttgctgtagacaacttgtaaaagtatgcagtacctatctgaatctgtgagtttgtaatcttaacaattgggccggtaatatcgaattctgccgtctcgaatccgagagcaccaacagtaccctggaagaaatcaaaatggtacgctgtgccttggcacttatcgttggttagtgtcccgatggtgctatatgctgctgtcaacttgtatgacgtaccaatactgccgaatacatgcatagtatccatgtagattgatgtgcccatcgaacccatgatgaatccatcgtggcaaacagttatgttaatggcagtaaatctgcttaagaatacagcatcataaaacttaatgccggtatgaaatttaaatatacgcagcttatcccaaagcatataaccacatccatttgatgcctgaatgcctatccctgatgttccaacgctaccatcatcaggaccgtcctgaataataccgaaatcctggagagacacgttgtatgtatactcccctggagttgtgggaacaattttgaagccgtcagagccttccgggaatataaaacttgaaatattgcttccttccccaaccatctccaaaccaatcttgttataaaggttttcaacagtaattgttattggtgttgatgaataatatttaccagctggaacgtatagtctacgcccagtggttgttgccgtgtttattgcaagctgaacggcagcataatcaatggattggtcaagagaggttacgaatggatagacagcttgtgcctctgcaagtgtggtgaatcgctcacttaatttatgaagaacgccatcaccaatcgcaccaaagtcttttacactaagtatttcaagaagtttattattaactgttcttcctaccgagccgacaactggctgttttgttgccaccagcatatcgccattgccatcacctgaacttgccagggctgctctcaacgatgcatcaccaacactaacccacttacctaaaccaattccaccggtgctatctggagttgaaccggtaggaactatttttggaaattctccatcccagcgatacttaccatccgcaaagacaactaactcattcttagcgttaacagttacacctgtctcaaaagaaccaggtaaggttacatattcctcacgagtaacagctagtgcacctaaatccacactaccagcagagtgaactaataccccagcaggactaaggcttacagcagtaacccctgaaccaatatcggcaggtaatgagtaagcacgctgtgacactttatcgtagatgactttgtaaccacttagtacagcaccgactgagaagtaaacaacttcagattgtttaactccaaagtgacgggctactgcttgtttattggttaggattcctgttgaacccttaccgccttgtgagaacatttcgttcatgtaaacctctttgtttttctaagtaagtccctccgaagagggacttgcagtggtaatgacagcactttgagttagtatgatagtaactaaagacaagattaatcccactatgatgagtttaatccggtactttgtttattgtactctagcttttatggtgtagttctcatggaataagtaaacgcctcattttgccctgtcaataaaggcacatcaccagaggcattaactatcagctctacttgtgagtttgttagttcctcttctgttttcccagtcatgacctcatctcgaattgtgatgcgtatagtggatagtggatcaccttgaaagaacaccgctttaatcaactgctcacccttgtcattcgttaaacctgcggcagcaccgtaatacacgtaatcatgtgtccaggttcctgcctttttatatacagaaaccagaactccagagtcctgaagtttactagatagtatgacacccttatttgatacttttgaaatcctgcaatcaaattgatagccgccgtcggtgtttaagaagttcccattcaccgaaaagtttatatcgctcttcagtatcgagcttcctctaacagtgccagagtactcccataaaagcggtagcgagcgtaacgtagattcaccagaccacttagggttagtgttctgattgtttgtttttagaactatcgcactagcttccttcgacgctgtgccgcaaagtccttcataatacccggaagatgcgttaaaggcactttctgtaaacggaagcttgtttgtctctgtacatctcggagcagggcttattgtaattccgtctagagcgaatatgtctttagctctagagaatgaattagaaaaagacccaggggtatacgaattatttattattgcattagcatatgcatcaattgttataaagttctttgttggtaatgctgtggaaggtcttgaattattaacaataagagaaccattgtatgcccagataaaatcttctatggttgcctctgctccgcaaccatttataacaacgtacccgccatgcagttcaaaacctttagctgccgcgttgtttgtcggctgctccccgaacgagcacgcattaacttcagagtatgttgatttcatctgaataccggcccataacgggtctactgcccacaccctgtttactatatttgatgtaccataggctctcagtagtacaccgcaactgtagctcgttaagtcttcaaaccgagacatccaagaatgaatatctataccgatgaagaatttagaaaacgtacatctagtaaaaacagattttggacagttagcgcccccctcctttttttgtatccatcgtgctgggtatacgtctgcactatcaccgaccgcccaaaataccctattgttggcagctactacctcagctgttccaccctggctatttaagttttcaaatgcaaggttatcaatttcaacctcaccttccggccacttaccatcccccacgtatgagataaaagcctctccatcagccaaatcgcacaggaacaggctgatattagtgtcaattgttgctgagctatatctgttacctgcaccaaaaagtttaaaaccttgctttgcaatgagtggcttacacttgtagcgaccagcaggtacatacacttgtttaccgaatgggtttgcagcatctatagcagcttgaatagaacttgtatcatccgtaatcccatcacctactgcaccaaagtctttaacgttaactacatcagcaaatctatcggctaatgttctgggtgtatcactccccgaagccaacacacttaactgcgaaccatcaccaatgtattgttgataggaatccagcagagcaacagtaatatttccaggagaatacgttaactgcccatttgagacactgttgatgtaaacattggtgggtagggtaggtaacccatatatacgttgggcaactacatcataaattatcttcttaccattgagtacctgagtagtatccgtactaagaattacttcactatctttgacgttagcagcacgagcgatttcttgaatacttcggtcaaacaacagaccgatattcgattgtttaacagacatttcagcgactacccaaacgcctgcagtcagcgcagtttgtaaagacactttccctgtcgtgctgtcataggaatattcaatttcgggtgttttgtactcaccaccgatataaagagattggactccataagatgtgtaatcaggagtgaactcggtttcaccccctacggcttgaaatttgtatatgcggatacctttggctgtatcttctggcgaaagaattttatcgaataagcaatacacaacatcgcctttggacaatgcgcgcccgagattcaacgtatttccttcgatttcaaagttgtctaacggaacttgcataccaccgttgattgtgactacgccagtgacaggatagaacggcaaggaaaggaaagtttccccaccgacatttgatttatacgtgaaaggaatctggtggggagctgtgatcacgccgccgaataattcttctacatttctggtcatttgaaaataccccataaggatttgccaatatggggtatttagtctgaactaataaaatttatgaacaaaggtataataagaaccccgccaaagcggggtttttgctcaagataaattaaagtgtgtatgttacataacttccatctggttttttagcaagcaacctcaatgctccgtcacttccgaagaagaatcctatagatgaattatgttccagagcgctctctggtaattgtaaaggggcagcaggtatactcatatgcttaaagcctaagcggttaagctgaaactcacctacacgtacaccatcctgaattgccgaaagcttgacaatacttgcctcaccccctggtgtagcaacctggcaatctgccgtcataagcaaagatgggtttgtagtaccacccatagcaggttgcattgcaagtgtcatttggttggcaatatgctgaacattgatattacctccctgaatatcgcttatataggtacatagtaatttcttagtaccggaaccagcacaggaaacattacttacttctgaagacggagcgtatatagcgtaaccttgtgtagtatatgcatggatgttaataccacgaagtctactacctccctcacaggtaagctgatttaggttagttaaatccttattcgcacctactacagtaatgttagtaatatcattgttagtacccctatcgaagacgccttccttatgggcctcataagtaacaacattatcaataatatttttctgaccatcccaccaagcaccaatccccatacaatcacgagtaataatattacggatgatatgttgagtaggtaggtggaaccatggatactctgcgagtgagtagtcatccacacgttcagttggcgaccctgtgtcagcattaacatcaataccatcatagtaacactggattgtagttatattgtcgaacactaaacggtagttcctggctgaacgacctccaatttcgttctgataggttttaatacctgattctccaacacggtatgagattaaatcccttactccaccatcatggtctgtaccaccatcattgcgaatgaacagtacagcggaaccagagccatattttatctcacccccaacaacccagttgccagtaccccatgcagttgtatgatggttctcaaatgtaatgcccgattccaaagcaataaaattgcgtggattcttaacaagaatcctattacataaagtaaatagataaccaccaaatgtagcttctgggttctctacgatgatattatcgccgctcattattcgcaaagtagcaccagcaacctgattttttacattatcaggaaggtcgtcccaaatatctaaatcgttaatatttggcttatatccaacatccaaacgctgctgaacagatgccagaacttgtgttgggtctgtaacccaattaccgtttgcatcgaatcggtaaacagtatacggcgtagttttagtatgcatgtgcggtttcttaattactgaacccgcacccaaaccattccaaaccaacataccatcgccaatgaattttcctttgcattcaatgattaaaactttaccgctaaaatctacactctcatctgcagtaaaagtgtagtcaacatcaataagcaatccatctacggctgctgtcgctgcatcctgtaatgtagaataatcagataactttactgaatatttgaatttcttattagcttcctgcctaaatgcagcatcaccaacactaacccaagcacctaaaccaacgccaccagttgatgctggagttgaaccagcaggaacaactttaggtaatgcaccatcccatcgatattttttatcatcgtgaacaagaagttcatttttcacattaatggtatggccgaaattaaaagaaccaggtaaagtcacatattcttcgcgacttactgctaattccccgagatcaacagagccagaagaatgagtgaggatggcttgttcgttcagacttatcgcagtcgttcctgaaacaatacctgaaggaagagaataagcccgttgggtagactcatcataaattactttaaacccgccgagattgataccagaagagaaataaacgacttcatcttctttgacaccgaaatttcgagcgatagattgtttgttaacatctatggaagtggagccgtgtggttgattgaattgagaaatcatgataataccccataaaggatttgccaatatggggtatttagtctgaactaataaatttatgaaaaggtataacaaacaaccccgccaaagcggggttttcatttatattacagatgttaccgttcccgatatagctgcttttatagccaaagttggattaggtctgatttgaacagtacccctgttgccagatgcaccgataaacacatcataaccggttgaagcattaaaatcagcgaataggcttacaggagcactattttgtgcaactggtgcagctgacgatgttccataccgcttcaatatgccaggcgtaacagcagaggaattaccatcccttctgcatacaatatccaagtcaaacgtgtaaccgtcaaacccgaactgtgtagcatcttggaaaaacttcattacttcagcggaagaacctccagccggagcaacgtaattgaagccagagaaagtcattcgagtaaaacggttatcttgaacaacagtgtcaaatgtcttatcaatcttaagactactaagcccatatactccgttcaagattattgggttttggacgcgagtgttcatactaatgtccagcttaggggcactatataaatctatacgctcccctacagacccagagcgatcggtaatgttaacagcaatagaaaaagtggtatcgtttccttcaattttgatggaggagcgtttatccacattaattgaaatggctggggatgcctcggctgttgacattccagtaattgttaacgctcgcacgtacttagtgaggtatatctttgcttcttcactataattacctgccaaatatgttgcctggctgtcgccaattcttatctcacctgtttcaattgtacttgaaattactgacgtcccaacaatgggaacttcaaccttagtccctgacgggaacgaggatgtcattgcacgatcaagtgtcaacacattcccagaaattgctgtgatacggcgtgtttctaccccaccagtagagttggtgaatgcaatttcaaaccaggtatcgaaccctgctgcatcagcaaccgtaacagtagtatctccaatatttgctattgagctaagtgtcgtactcattccttcaatagaaaccgtacactgcccagtactcccaccgatatagcccatcagttttattgagttattccggacgcgtacaccatactttgtcgaagttgcaccgtttgctgttccctgggagtgaccataccaatgcataaccagatgtagcaggtcatagttactgatacggtggttgattgatttattcttaacggtagcgtaaggtgctgtgtaaatagctctcccggctgcggatgctcctttttcccctactccgccattaacagtgaaaccttcaactgtctgatgccaatgtaatcgatctcggtttctatctcgtgggtcaataccaacgtggtgcagtgaaatgtctgagtctgctgacatgagaatagttgcgtcattgcctgcaccagagaatgtaaaacctcggcggtcaacatctaaagtcacttggttggtactaaatgtacctgccggaaagatgagctttttaataaccgcattggctcgtgctacacggttagcctcatctatagcagcagagttagcaacggggtcagttccaccaaaaccaaactcttcataacccatattgcggtgtagtattaggttagcgaataaaccatttgcaagggttatggcatatgtgctgctatctttcgtagcactaactcgccattttgatcttgttttaataccatattcattagctgctgtttcagctaacattccctctactaatgaaatattctcaccagatggtagggttcctgccacaagttcgctaaccgttttaaaattaattgtaatattcttattcacccattccctaatggagtgagcacctacactaatccataaaccactaccagtacccccagttgttccaggagtagagtcagcaggaacatctttgggtaatgccccatcccaacggtacttaccatcagtaaagacaaccagttcattcttagtgttgactgttacgcccgtgtcaaatgacccggacaatgtgacgtactcttcacgagtaacagccaattccccgaggtctacagaacccgctgaatgcacaagtacagcggaagaactaagactgacagcagtagtaccaggggcaatatcagcaggcaagggataagccctttgcgtctccttgtcataaataactttatacccacttaacgcagcaccaacactaaaataaacgacctctgtatctttaacattggttgcgcgagcaacttcccgcaaagtatgatcaatttgattatagatgtttggtgttccattgataattacaacaacttcatcctctggttccagttcttgcgcaagagtgattttactggttaatggatcgaatgtgaaccccagatttttatactggcgacttccgtttatatcaatggccggaacatcatcaacaacgacgtccaacgtgatttcggtttcaccaccaatcgctgaacccccattatagacccaggtaatcgtggaagagccagaaccatccccaatacccaattgaataggagtatattcaatcacctgaagttctgtgctggctggcaaagaaggactgaaagtgattacattcccatctagtgaatatttggattccgcaagacgttttccatcagcatacacgtccacgattgttggtggagtattgagagtgacagaacttgtctcagacgccaaaatttttgtaaagatttcacgactgtagacacgaccttggccaagaccgacgccggatgtaataatccaaccttgttcaggtccagaccaagtgaacgttgctgatacgttatcagttgttatagccatgtcttcagtggagccatacaaattatttccagaaggagacacagtcaatgggtaagtggcaaatttcccataagcgtcgcaaatagtaacagaatccccaacacgcgtaggggaagggagaaccactgtagatgcccctgtggtattattaatgagatagcctcgcccttcagtgagcgttgccgtagaggcatgcggaaggacttcccagcggataccaccgccacccagcggcaaccatccaccattttcataaaagccctcaaattcgtcggagtcggcattgtagcgaacggaagacgggagtcctgcgctggtattaccctcgggtaaagtcaggacagcatctggtccatgctcaatcgtacccgtgttgacgacaccagccaaagtagactgctcttcagccaccagaccgagagggaaaacaggctgtgttggtttattagccatttcaaatacccctaaatgtgttcgtttcatctaggggtatttagttttcactttagaaagaagcgactagattgtagtcaacgtagcacgcagtcgtcgtgttcgcattaacaacggaaattctcaatttaccacccaccacagaacctgtgaacgtcactgtaccgctcgtacttttctgaaccaacaactccgatttgatagttccgtcgcgagttatggttactcgatatgtatcaacaacgttacctgttccccattgcgcggtcaccagtatttgacaaaggttcaccaaatcaaaatctggaagagccgtcgtcccagaagccgaaaccgtgtaagaagacaaattcgttttggtacgataaacggcgttccctaaactattgtcgacagaggtcatcttggcattatacgttgatacattaactttatcactggaaagagaactgatgctgttatccagagatgtcatcttcgtgttgtacgtgctgacctcgactttattacccagagacgtattgatattggagatactcaaatccaacgatgccatcttagtgttgtaagtcgatgtgttgactttcccgttcaacgatgtgttgatgttattaatctgggactctagactcagcatatctgcgtcatacgctgtcgttgtcacatatccattaaatcggttatctgcaaacaacgcatcaaaaaatgcagtcattgtccaataacgcgctccagaatctgtttgtactggaattgaagtcggcatcgttgatccggtatacgcagacaatctggtgaaatccaaattgaatttgtaatatccggatgccaacaactccccagccaaaccagaaccaggtggggtagtgtcttcactgacaccatgctttctcaacatgctcaggttaacaccatctgtcgctactataggctcatccgcgatagacagtttcttcccagccggaacagtcaggccgccgttggctgtcaataacgcagcaaaggtcttgttcccgttgatcgtttgttcaccaccgtcggtgcggatcactttgttttccagtgtgtcgtagatattatccacagaacgcttcagctcgtatgtcaaatgagctgaaggagggaacaacggatcatcaacagcgaaatcgttgacaacatcagtcttgcttattttatcgtcaacagaagaaaggattgcatcaatctgctgacctgtgtatcgactcagaaaatcggccatttttaactccttgaactttctaggaatacagtaaacccagcaggatggaaatgctgacggaagacgcgatcaaacacaccttcaaaatcagatacgttgccaggaactcttatcacatacgtgaattcatcatagtagtaatcgtcacgcattcctgtcgcgccgtcacattcaaagttgtcatccaggccaccaattgcttccttgggataatacacactcactgggcaaccaaagtaaatccagaagaacaattcaatcgctttcttcgtcccgcgaatgcgataaatgtgtttaagtaacttcaaccagcgtacatggtccagtgtccggcgttcagttccctcgacatacacagagagagtgtctccgtctgaagtcaccaaactgtccgaaccaactggcacaaacttcccgaactccaggaaggacttatcaaccgttctctggaatccaaaatcagcataccaatcgtcgatgcgttcgttcttgtcttccattgagattaatggtcgaccgtccacgtccagcaaatcttcgaagtctagcgccatcatgttctcaaacgtgcgcgtcaggaacttgtcttccaagaagtctttggcctcagtacctggcgtcttgcgcttcttgatgtcaatcaactgctcaataggagactgatccgtatttgggttcacccaaccaccagtgtctgccagatacgccaagatctcctcttcggtgaatccctgctggcgatacaaccagttgaagaacgtatccataaactcgatgaatactgggaattcattctggtaaaacaatggggtttcatatttcaccccattgtgtccgttattaagatctttggacataacgcacctccggctccacagttacagcaccgatgcggagcacctgattctgtgtggcctgaatgttctggtcaagaccgtctggagacacaattattgtcacaccctcagtgttgtagttggatactatgatacgctggagttcaacaacgccagtcacataatcaaccgttccaacagcttgtaccagatattccttggtcgtgtctgttgtactcaccttgtacatattcaggacaccactgacgtcgcgtatgtagtaagtgaattcgacctcggccggaagcggcttaaacccactgatacgcacagaaccagacgcaatcgagcgcccataatcgaatgtgaagctgtccagtaccccatagtctggcttgaaatggcgcttatacttcacagaagtgatgtttgacactatcgatctgtccatgtcggtgatggccgactgtaactgctctttatcgaacagttcgtcgaatccttctaggttccccaagccccagttgacaacaccgtttttcacgactgtcttcaactgctcttcggtataggacgtggaagtcggatcccagaacacgcgggtggtgacatcaacataagtcagttcagcgtcgacaatcttgggtgtgatcgtgcccacattgtacttgtccaacttcgccacgatatctgccttctcagcgcccgagagagcctcaccaacagaaggtatcacagcaatgtaaacgtatccggaatcgggcggagagagcgtgtcgccgccatatgctttggcgcgggagacgttggagaacagacgctcggtcaacacagcataatcggcttcggctaccgccgcaccctcagcctgataagccagcggagcaaggcgcttgatgtcctcaatgctctctgggtccttaccaccggaagaacgttctgacaccagctcaacatctacaaggttgaatcccccgatggaagacgcggaggacaaggcagtgatgtcattgccgtctgcaccagctgtctccagatactggaggtacacgacgttcccgtcttctactcgcttacagatatacccatcaccgaattcgaacgtgtacatcccgtccaaccccagctcaacgaagtagagttgcgcatactggctcaaatcgaacgggctgacatatcgtgagaaggtagaccgcacgtcagatgtctcagattcctgtacctgtaccaccatatggttgatgtccacggaagaagatgggatcacataggtagagatcgcgctgccttccacatcataggacttgtacagccagttaccctgtatgagtttgatattctcgaacttgtaagatccgtctacaagagaggcactcacaggttggtcaaccgtgaagttataggatttgccatccttcaccccaatgaacatcgcgcggcgatccattacaatcgtgtctggagccgtgctggcgtcatatggagtgactgtgacgtttgcgtacaggtacgctgcctggtagttgtgaggggtgtaagacaagaacccggctgcaagaccgacattagaacgctgttgagcagagtgaagatggctttcgccattcagcatgttctgcataaacccgatagagttggcatccgaggccaagatacgcacgattgcactgagaccagaaccttcaaagtcataatccttgaaagttggatcagctttcatgcgcttcttgataagatactcgaaagccctgacatcgagtgaagggactgtttgcgtggccatgataatctccatcacctgagtttgaatatggtgttgaagatatttagccaacgggaatcaaaacgctcgcgcgcgtttaatttattcgaatataactcgcgagggggctgacgccctcgctcgtaacaccgccctatgcgggcagcaccattccacagccatggaggctgcttctcgttgttcgttgacactcacaactcgaagggcactgcgttaggatacagtttcttgatgttgtagaaaagtagtttttacctattaataatcactgtcattattttattggtcattcctgtgtttatattcaataaacatactcccaatataataacggagacatttaatcaatccagtgaggctccggaatgcacattaacacagcaatcatgaaacacattattcctttgttagcaaaatacgaaggggaacgcgccacgaaaatcccttttgaaacaatcaccgatgaagtgaaacgcctgacaggtaaaagtatcaatttccgtcgcgttattgaatctgcgttagagttggcccgttctgatttacgaaatccaacattttcatttaatattgacataacttcttcacttcgacaagaattggaagaatcatcacaagcacgacgcgatcgcttccgtcatttatatgttcgtaacgaattctctgaaggtcgtgttggtatgaaactggagtctattcgttctgacatttgcttcactgtcaactatgttttagagccagaaagccagcgcatttattttggcgcgattatcggtttctatgggaactctattaatggttgggcagaacgtgttggattaaaagaaacccagaacaatcattccacaccttctacccattatatgacgcatgaagctgctggcgaatatgtttaccttctgcgtcgtgttgtgaagttagaagtgttaaaataacgctttattcaataaataattgtagtaaagttagttgcatggaagggagggaacactatgttttacatgatgttactcctcatcctcctgatcgggattacctttactctcctgggtctacccgatcagtccggtaaacagtcgcccacttcggcgcatccggttttgagtgaaggttcgtccgcactgctgtgggcagtgtagctcaaaggggagaggacttttcaaattagctgggctgcggtaaagtattaaacatgagggaaataacacagtgggagtcgggtttgcagcccaaaaccagttaacccctagtctcaggggcttgtgtgaatagaggcgtaatagccacctcgctggtgtcagtggacgcacttgaccgtcggagaacgaaactccctgttgtagcgtgattagctcagaatcagagagcaccccgttggcaagtcgacaccaacgtataaggggaggtcgggggcgctaatctccatcacgccgacaacattatgagtcttcatagagggttcataatgttgcgtcaaagggcaacacgaggattcctgttggttgaattaacttgattcatagttcctgctgatcttcccggattcagaagaacaccgacaggacgaggccggatgcgtaagttccggcaaatcgatggtgaggtggtgcattggtgacacggggcagcgctcagaagtgtggttcgattccacaccctcgtcaacaaaaataaaaggttttatcaataacgggttacaaagtatagttaactcactgaacggcaagctgtttgagtcctggccactcatagcgatgtgagaccaagacaggtaggtttaggactcaaacaggttttcgttttcgttgtgcgtgactttgcggggttttagaaactgaccacaaaaataatcgctaatgataacacgttcctggcagtagcttaatagccatacaccagtgaggtcttccgattcctcataacaaaattcggcgcactaaaataggcgggagggtgtgattaataatctcccgccgacaatgagcggagcgtgtacttaataggtcgatgggagcagactacttctgagaaatcaggagcgtgcatgagaaggttcgagtccttcctccaatcccaaagccgttatatctgactgtccaaaggggataagctcctgagtaggcagaggtgggttgcctaagtcagatgggatgtaaggtcagcgctggccaagcatttgggttcgactccctaaaacggctccacatcttagaggacattgacaggtggaagcatttggcgccaaatgttcgtggcgggttcgagtcccgtgcagtgtcctctaagatgtgagcgaagtcttaccaattgccctgatctctggcaagtgaagggcaacgcaaatcgaagttctctgggtatatcttttaaccctcaaggtctgtacacagaagtggccgtcccatgagtaagttaggcgatatacaacatgttgggtcgaacctgttaagcccagagaacttcgatttgcgtacttgagagagcgttgtatgaaatagggcaatgccttgcagacctcgacgcctacacattctagacactggtgggcgctggcgaagatctcaatataagctggtcatcaagggtagctccctgactagacgaacaatgagaggccgaactaaggggaaacccgagacaggcgcagtattctcgagttcgcaaaacagtgatcatctgacaagtgtgatcactcttcgatagagacattacatcgtggccatcaaccacatcctcgctctagtgatgagtggtgttatgtttctgtcggccagcctcgtttggtccgagcgatagaggacaagtattcggtgtgacgaagacattgaatgcgagttgtgacatttggttgcaactttgatggctctggatttcataaaccatgtctatgggtgacgcgggatctttagtaccagagccatcaaagttgtgtccaacccgatcttgcaagcccgtatccctgtatggtcaagacttgcaagtggaaagccctggaaaaataaacgcctgtggtgaggctacggtgcaagccaaagacccacagaagcgcgttgccgtgaggcgcacaaacaggcatgcatgaactgatcatgcacaaacgggataaagggttgagagaccttggttggtcacaacaaattcatattgctgtgggtagttgttatggaagagatttggaaagagttgtatttagacaaaattggcattcatgtatttgtcagcaactatggaaaaattaaaaagccagaactgactatacgccgtaaaaatcagtttggagaatatgaacaaaaactacctgaaagatatttggtgggcgtagacaatggaactggttatttgcaaatcaaagtagaatataagggcaaatatttcaggaaatatctacactggtttgtctgggttgcatttaatggtctagtcccagaagggtttgaaatagatcatgttgatgaaaataagtataattgcgtattgtggaatttacaattgctgagtaaggaggccaacatgaagaagatgttgaaatccaatccacatgtgttagataatttgaagaaacaaaaggtcctgtagctcagtggtagagcagccccctcataagggattggtcgctggttcaagtccagccagggtcaccactaaataaaccagttgttcaataaacaattggtgagtatgatgaaaacgttcggtgattttcttactgagtgggatggtctcgctaccgacaacaaagagattgttgagtttgttgaaaagcgaggcgataagtgggttgtccttgaccacaccaagactaaagttcttgggacacatgacaccaaagctgacgcggacgcccaattaagggcgatcgaagcgaataaacatagttgaagggttctatattatgaagaatatttgggcggtgatttccaacagaattcgcgctagttgggaaggtcggatggtgagcatcaagaacgggtctcatccaaaaacttacgatcgttatgatcctgccctggatcttcatacagaataaagagtgtttacgaaagtaagaatagagacgatgtagttcagtcggtagaacggtggactgttaatccatatgtcgcaggttcaagtcctgccatcgtcgccaaattgaagtagagtatctcgaagcgccttcggaagtgcgaatcgcgcgatagctgccaatgtaaggctgcaggatacagatacccaggggagtgagacctacttcatacaatttcagagtgtagaggctacagtagtgcgcacctcacggaaagctacaccggacactctgatacaaatctatcaccgcgtggattagctgaggaaggatggccgatgtcctcaagcgtggcccagcacgtggtggtagaccaaacacggtaagcgttgcagccagctgtgtataaaatggggatgactccacatcggaaacgatgccccaacttccagaaatggtcaggcgcaaagcctgtaaagttccaggagatcgaaccagaaggcactggtcgccagttaaccaatcggcgctgagaagcgcggggagttgggctacggcagatcaaatgctcaatcgggtgtgaagcccgtccaaattggaaggttgcccgagaggtttaagggactcgactgctaatcgagtggggcttttagcccccgaaggttcgaatccttcaccttccgccaaattacgggcgtgacttcctgaagagttagaagatgtgcatgtcgactctctcgtaatcggggtgtttaggaagttaagaaaatcgcggcgaggatagtgaaatgcaaatagctttctctacgtcgacgacttcaggttcgactcctgacgcgctctcccatagggtagtaccagtgcaagtgtgtagtctttcaaccatcccatcgatgtggtatagccggataggatatccggctatctttttatccctgtcttattatcttcttatcaacccaagcatgtcctcatttatcgtagtttgttcaatgatacaaagggggtttaaaatttaaccgttaaccccctatcatagatttgaggatataccaatgcgtaatgtttctatctgggaattgaacgaagtgatttcccatgacacccctccaattgtcagactcttccaatacaagggtgtcaagcgtactctgaatgagttcctgtcgccagtttacgtctaccgtgatggcgggttcttccgccgcgataaaaacatcccgaaccttggtatgacgtttgatttgagtatcaaaggccaggttgtgctgatgggttatggtagcctggaacaatctgagaatggtcagggtgctccgcttatggtcttcggttcttttgaacaagccgtgcactggctgatcagaaacggatatgatttctatggcgaagaaagcgccaattggcgtcgtcgcaaggtcaagtctgttgatctggtggatttgaatctgatgtatcaggccatggcgcgtgagtacgaaaagaatcttccgaagtctgtcgtccaggggaacaatgttgtcaacactacatctgagtcttctcatcatgacgtgaacatcgttccagcctgtgaaacgaaagcgccgacaccacctactcctccggccagtcgtgttctgaatgatcagggcgctccggtaaaacaaaaggtcaagaagccgactttcatggaaaacatgatgaagttccttcgtctgttcaagaaataagccgagattctccttttctatactcctgtagatacactatgataagccaatgtctacaggagaaaatagaatgaacaagaccatcttcgatatcctttccctcgaccgcaacctggtccattgggaagattatctctacaagcacaccccgtgcgaacttgtcgtcaaccccgaaaccaatcagcaggtctggttcaagcgtgaagattattttgcgccgctgtccaattatgcaaatggccagcagggcatcaacggcagcaaactccgccaggccatctggttgatggttgagcacctcaaggccggaggctcccctgacatcatccatggtactgtcgttggtagtccgcagtcccctatggcgacggcagtctctcggcacttcggcggcaagacaaccactgtactcggagcgaccaaacccaccacctgtatgaaccacgacatggtggcaatgtcagcctggtttggtagtgagttcaacttcgtcggctcgggttacaacagcacgatccagccgcgctgtaagaagttgatcgaacaacagaatccaaaggcgtattatctggaatatggtatcaccctcgaccatacagcgcattctcctgagcgcatcgctggcttccatatgctgggtggcgagcaggttgccaacatccctgaccatattaccgatctgattatcccagccggatcctgcaactcttgcacaagcatcctgaccgggctggcaatgcatccgaagcctaatctgaagcgtgtgtatctgattggcatcggtcctaaccgccttgactttatcgagagccgtctgcgcatcatcggcaaacatgccaatctgccgcacattgtcgacttcacccgtcgctatcacgacaacccagactatgtacacggcaagaaggagcttcagcatgcctctaagagcgtttcgctggctggcctcctgagtggtatcagacataaggaagagccagaggtcgtgcttcctctctttgaggtacaccattgggatcttcataccactaattgggttcgttataatgacctgatggaatatcagtggggtgatattgagttgcatcctcgctatgaaggcaaggtcatgacctggatccagcagaacaagccggagttgctcaatgagaacactctgttctggattgtgggcagcaagccatacatcgagccgatgaaggcagcatgccctgagctggctatccctgaaacagttcctgtaaacgaattcaccccttcctgatccctcctaaataccccatacaaccagtgtggggtatctatgaaaaccttcctccaatatttcctagaggcgtcctgtacaaaccaggcctcgccaagcgggaagcctaaataccccatatggctaacccactgaggaacctaacatgccaacctccaaattgtttgaatcagaatacaccaatgacatccctgtatggactggtgttcaagacggtatcacgattgagctgtttaatcgtgaagagacaggcgcggaagagatctatgcaggcgttgaaggcactgatgttgtccgtgccgccgtagcacttgccaccttcctggaagatgcaccgattgatggcgtgccgttcgaggcgcacgtagatcccaaggatccgacctctatcatcattacagtgaatggggtgccatacacttcgtacagtatcgagacggacgaagagggaagcggagcgctgtatattgccaccgacctgcagctggaagacgatgagatggattatctgattcagaacggggtgctgccaccgtttaccgatgaagaactggacacggaactggctgctgtcggggacgacgaagacttctgggaagaataagaaaaggggcgttaagcccctttcttatttcttcacattaaaggtgggaatccagccaggcgttcttttcgttctgccactcccaagcggcctgaccgcctgccatgatcacttccagggaaggagtattgtcatcctcgccaccgtgaaggtcagggtcgaagccgtcatcttcaggatcgtcttcgcattcattctgataagcggaatattcgatgtaatgggcttcagcatcgcaatccatgtcacccagagcagcctcaagagtcattttaccttcagcgatcagttcggcagtcgcatcgtccaggcctgcgtctttcgcttcaacgaacagttcgtggcgtttctggaaaaggaagaagttcatggcttcaatgcgtgagtcgaagtactctttgcggggaatcatgatttcacgaccatcgactttgcttaccatcagcaggtgtgaaccgtattcaaccaggtagcgaccgcctttcactgggttggaaccgtcaattgtgcccagagtggtgattgcgcggccttcttcagtgccgtacattacagttttaccagatttggattgagcgataatttcgattgccatgatgtatttccttctctttagattgttgtttgttcgtactacaattagaagtatacgccagttattgaagaagtaaactttattcaataaatattttaataaattttgaactctgctcccctgtacgtcgccgtccctcgttctatgagaccgtctgggacaatcacctttgtcggccaaccaccatcgggagccttaacagtcaggcgcgtcttatgatcgcccagctgtgtttgttcatagatccttccgcgtactatcgtcgccccgccctgggtgacaagcaatctcttgtttaccacattcattccctaaacaccaaaagaaaggggagtttcctccccttgaacttatttcttcagatcaggccacgcaccagaggtcgcagtagacccagctgggggagcagactcaagatcgggagcacccgactgagtaacaacagtgggatctttctgtacgacccgaaccccaaattgcttgagagcatccatagcttgggcttttcgcctgttgcttttgtagtggttgtagcctttgataccgaatgatgcactaattgctgtcaataacgaataggtataccattcaggtgcggtatctagtgcctgaaggccaccgattactgctttgatgaaatcccctttatgatactcaccagggaacagaaacagttccacaaccggagcagtcatgacgaggatggcgggtatggccaacacgatagtccagaattcgtctttccaagacccgccgacttcggtaatcttagacagctcccaatctgaggaggacttgatggcctccagcttgacgtcgtgtttggcctgtacaacttcccgcttatattggatcaaatcagtcccgaggttccagagttgcttgagcacccctgggatcataccaacgagggggattgccataataaactccttggtcaatgaatggctctatggttaaatatgcccacgtgctaacggcacggataacctggagaattacatgaccgttttctatacgaacgttgcccgcaggggcaatgacctgttgattcgaattgcagatgacatgggtaatcgccgtctgttgaaaaagaaattcgaacccactctctatttacccacggctgactattcaaatgttgaaaaggtcggccttctcaatgaacccctggtagccaagcagttcccttccatgcgtgacgctgacaactatcttgaagagtacaaggaagtccagggtgctgccatttacgggcagaccgattatgcataccagttcattgcccatagctttcctggaaagattgagccggattattccaacatccatattgctaacctcgatatcgaagtgttctccgccgggtggaaagatggaaagatgaccaaaggtccattccctcacccaaccattgagcagcagacgttcaaaggaaatgaggcgcgcattcgccgcttccataaacaagtgctggccaaccatgattttgtccgtgagcacttccctggttctttcatcagcaacaacgtcactgatcagttccctatcattgacagcaacggcaagatcacccaagacatgaatgcggcgttccccattaccctgatccagcttcaggatatggcgaccaataagttcatggtctggggtatgccctgtgccaaagatcgtaacaaattcgcatacgacaccgaagacaaagagatcggcggccttgaggttgtttatcaggagttcaccaccgaacaagatctgctgcgctcgttcctagacttctggtcggagcgtcagtttgatggctggacaggctggaacattgaaacgttcgatagcccgtatcttgttgagcgcatgaatcaggttctgggtgaggctgaaacgtcgcgcctcagtccttggggtatcattaagaagcgtatcattcgcgataagaagggcgatatcacgacgtatcagttcgtgggttgccctatgctcgattatatgcagatctacaagaaacacacgtacaccacccgtgaacgctactctcttgactggattgcgtattgtgagctgggtgagaagaagatggactacagtgagagcaagtcgctctttgatctatacttcaacgactactgcaaacacacccgatatggtatcaaagacgttaagctggtatggcgacttgaacagaagctgcgcctgctccagctgatgttcgtcctggcctaccgcaccaagtccaactatgaagacggcctgggtactgtggctccgtggctggctatgtgctattatcgcctgtacgagaaggggatagtgcctaagatccagcgtgtatacgatggtccgaccgactttgagggtgcatacgtcatggatgtgacaccaggaatctacttctgggtcttctcggaagatttgaactccctgtatcctcacatcattcagcagtacaacctcggtccagagactatcgttggtgacaaacaccagcgccgtgagattattgaggctatgtgtgaagagctggctgctcagatgaataacatggcaacgccgatgcacaaacgtcggttgatgaaagcccttcacgacaagctgttgcgtgcggttgacgaacgcctgcaggttgttgatgagttggttgccctgggtgagttccactttgaaaccctgcgccgctacaacgtgtcgttcacgccgaacgttcaattcttcagcaacgagaagatgtcgttcctgtctgaaatcatgcgtggtatctacagcgaccgtaaagtagagaaggccaagggtctgaagtatgagcagtgggctggctggtgtaaagagatgtcgaagggcgacttccatcttgagtctgccatgaagtctcgctactatgacccagagtggtatgaagagcacaagaacattgatcttgatgccctgaccgaagtgatgaagaagtgggaagacctgggcgtcgctcaagataccctacagcaaggtctgaagatcttgatgaacgcaggttatggcgctatctcaaacgtctggttcaaagagtacttcaacctcaacattgccgaagccatcaccacatccggtcagctgatcaacaagtggaacaagcgttacactgatgactatctgaacaagctgtgtggtacaacaggccaggacttcgtcatcgcaggggataccgactccaactacatctgtattgagcgtcttgtcaagcagttgtggcctgatgttactgaccatcatgctatggttgataatatcgaccaatggatcaaagacaactaccagccgaagaccaatgagtgggcacagcttctgtgtaacaccatgaacggatttgaacagcgcatggtgtgggagcgtgaggtcattgcgtcagccgctgtctggcgagccaagaagatgtatgccatggccgtgtacgacagtgagggtatcaagtatgagaagccgaagatcaagttcaaaggtctggaagcccgcaagtccaccacgccggaatggtgtcgtgagcgccttgtcaagtgctatgagaagatcctactcggcaccgaagaggaagtacagacgctcatctcccagtacaaagaggagtatatgaaactctctgtagacgatatcgccaaggcgtcaggcgtgtccgacatagagaagtgtgtggctgctgacggatcgtttatatctggtgctcattttgctgccaaggcgtgtgtgggctacaaccgtctggttgagaagaacgaagatctgggtctaccgatgatcgagtcgggtgataaggtacagatggtgttgttgaagccgggcaacccgtttgggcagaactactttgcatatcctgagttcttccccgaggagcttggtctgggcaaatgggtggattatcaggcggcctttgagaagtccttcattgatccgattcagtctatcctcgacgtggtcggctggtcacacaagcgccgtgtgaaccttcttgccatgatgcaaaagaagaaaggttgattcaataaaccaaagggggatataattccccctgttaaccctttgacaaacaggtgattgaaatgaaactcaataagattcttctggtgtgcgctctggctttctctaccactgcgtgttccacccttctggacgttgcttctactgtagaccttgacacgccgacgttcaccaatgagcaggccgtgtccaagatggaagacaccatcaaggcgcatgcagcactggacaacactactccgggtccgctccaaactgtctgcaactatgacgattccatccaggaagacgaaacttaccactgcatcacctacgtgaagcaggcctccgtcgttctgtatgcagattgtaccgaagaacagtgtgttgctacaggctacgataaagttgaggaagacaaatgaacaacctggtttgtatctatgatatgaaatcaaaggtcggtggcctgtatcgcgtcctcgtggatgttgacctgacgttggtcgacagcctctccccttgggtgcagtggttcaacgaagagaacatcgccgccgctgctatcgctacgggggaacataagtcataccagttccagccgattaccaaagagtgttatatgtcccatgctggcgacctggctattctgatgcgtgaacgtgcgcatccggcgtggctataccatgaagtccaattggggatgcacaaacaacgtgtgccaagcggtaacgatcctatggactggtggcgtcgccctgacttgtacgccaagatgaacccgctccccggcgcttacgagttcctggtaaatctgaaggatatcttgcttgaagatttcgacaatgttgaattcgttgcggtgtcgaagtgcgagccggaacacgagcgcagcaagcgccagtttgtctacgacaagttccctggtatcttcaacgggtttgtcagcaccgacgaaaagcatctgctggctggcgatgtcctgattgatgacaatccgaagtatgtcgagccatgcggtctgaacaacatcttcgtcatctttgttcctcagggcaattatgaaaaactggatctttcgaattcggaagacatgctttatattaaaccagtagaaggccagaaccacttcgacttcctgaaccacaatattgtcgaagtggttaaccgcctgattagtcattatcaatacgtccgataggaggacatcgtgcaagaacaatccaagtttggggaaaccccagacaagcgttccggtgatagcgacatggatagcgtgattaaccatgtgaacaacttcattcgtcagcaggagactccaactcctatcggtgcagccaaggctcttcatgatgtactggtgaagatcggccagcgctctgaagcggatgaaatcttctataactttgacgaccagtataaagttaagtttgaagagaatggccgcccacaggttgctgtgttctgggcaccttggctgggcggcgtgagctggcgtattgaggatgctgtgtaatgctgtcgctctacctgatcacgaatctcgtcaatcataaattctatatcggtgtcacctcagaaccggataggcggttggctgagcataagtgtggtcaggggagcattgcattacaacgagcgttcaagaaatacggtgaagaccagttcaagtttgaagttctgttccgagggaaagattcggttatccttcagatagagtctgaactggtctgccaggagatccttgactctgggtggtgctacaacatggtcgtcgggggtgggaagcctccattggccacgcctaattcatccgcaaagagtgctgcaacccgcaaacgtttgatcgctgagggtaagatcaagccacctccccgcatatcggctgagtcacaaagaaagggtggtgaaaccagaaggaaactgatttccgagggagtgataaagaagccattacctccaccttcagaagcccagaggcgagcaggtgagacaaggaaacagttgcatgctcttggcctgatagacattggtcctggccgcgatgaaacgatttacaaatggcagcacaaagatggtcgcattgttgagttaagaagatgcgatatggaacttcaatatggcctcccttctggtaatataacgaatctcttgaaaggtagggctaaaacatgtctcggttggagaataatgaatggctaaaataattgtagtgaagggaacaagtggcgtgggtaagggtacgagagtggtccagttcatcgaatggctgcgcactaagctggagcctaccgaactgacctacaccgttggtgacaagactcgcccgtttggcctgaagttcggagagctgaagttaatcttcgttggacagtacaccgtgtctaacaaatccggcctggcttcttggacttcaatggatgcaatccatgctgctacaggctcaggcgatattgctcgtgatctaatcaagtgctggttggttcagggatacactctggtgtgtgagggcgaacctctcatgctatcggacaaatggcgtcctgaatggatgttcaagaactatccgattgaatcattggcgctgctgtactttgcgtaccccgaccgctatcagtacgatgctcgtatccgtggtcgatctggtaaagaagcagggaactccggctggtcgcgcaacgaatcttactacaaggagtttgagaagtcgaaggccgaaatgctggcgctgggcttcactgtggctgttgatgattacagcggacaggatatcctgtataaatcaccggatgccaacacccaggagttcacgaccaaacagcagtccgagttggcggtactaccgttcgacgccccgctgtgggttgtgggtaatgcgatttgtcatcagatacgctctgaactgcgcggtgttgacatgcacatcaaagacttctatgctttctgtgaaaccaatccgatgactcgtgaaatcggcggccatgatcctttggcgcacagagtccctgagaagccgcagaaggcatccaaaactaaaaccaagacgagcgcccagccagaagcaacgaaggcagcgtcgcgctctctccttgacctgatgaagaaggggtgatcatgaaacggttgtctaattatctgttgttcattggtctggttatggcagccgtttcaatgtgtactgccctagcctatcatttcacccctctggacttaacaacctcagagaagttgaacgtgactgtgatgtactgtattggcgcggtgatgtctatcggcgctgctggttacaaaatattcaaggaaccaaaatgaaaattcaaatccctcgcgatgctgtggctgttgcgatcgactacaccggaaacgccaagcacattactgccgtgcgcctgattcctgaaaagaactgcgtcatccctcagttccaactgaatgccaatccgtcatccaaagacttcggcaagtggttgcaggctgctccgttccgtacccagacgaatgctcagatgttcatctcgggtaagactcacactgcagcccgtctgtggttcgtgaccgctgaccgtcgctttatcgatatgtgggaacgtccgatggggttcgtgaagccggaagatattcagctggctcctgagcctgaagctgtgtctcctgaagaggaagcgaaagatgcatcatttatctaaaatgccgacgggctatacgcctccgactgaatggaagtacccgattgacctggctgttgattatcgcaagcctgagaatcgcatgtacctgctcaaggcttgggtggaggcgctgtcctacacagaagagcacaaccagcagatgcgtctgatggactatgcgatcgaagtcactgaaggcatcagtctcgaacagaaagtcgagcgcaagatctggatggcattcctgtggggttgttgctataacgccgtcgggccgtggacgatctacagtgagttccctgtgccgcctcagtctaaggaagagatgcagcgcttctctgattggtacaacctgaactttgatcgcatgcgattcgataccgactgtcgctaccgcaagtccaagatgatcccgtgtgttcagtcctatattgactggctggctggccgtactcaatatgacgctttccgtgggatgttggtgtgcatcgataagacagaacaattcacccagctgtgggacacggcgatgtcctggaaatacttcggtcgcctgagcgcctggaacttcctggaagccctgaacatggtattcggaaacgaatacaccattgacgtccctggcttcatgttgcgtgatcgtgatggaagcgagtccaaccgtaatggcgcggcgttcttgtccaaccgtgacgattgggtgactaaacacgggaagaaaaagatcaacggttgtcctatcacggatgaagagtgtgacatccttgaggccgaccttgagcaggcgttccaggattgtgtggctgagttcgggcacctgacgttcatcaaccgcctgaactttgaaacctccggcgcttgttggctgaagaaattcttccgactgaagaatacccgttacatcgggtgggacgcagagcgtacctgggatgagatagactacatggaacgcgtctggcctgaatactcctgcgcagcgctctgggaagcccgttcgctctggctgccagataccctgttgtgcgaaaaggctcctgcagggcacgttccaggcgtccagaagtggaagatgcctgtgttctttgagactggtgttcctctgcatatctggcacctgcaaaagggtacgcgctgggagcctgaccaggtgtatcgagaattgggtaaaccgaagattgataaaccgaagtccagcagcgtcaacctcatgacactcttgaaacgctgataatatcctcgcctataaagcgaggatattatcatgttacaagatctgctggtttatgcgcttcctggcgcggttgtcggcttcatcgctggtgctctggtcttccgtaaacacgcgcaagacggtgaagtgattgttcagaagggtaaagacatcctggaacaaatcgaagccaaactggaagagctgaagaaaaagtaatctgattgcgattgcgttcttcaataaaggggaatgggttaatattagcccgttcccctttctttttgcaaggaaatacatcatggcaatgcaacgaattgaagatatgtccctactggatatggaagcgacttttggtgattactttgagtccactccgaaacaaaaagaccctctggttggccgtctggtggtttctgaagcgttcgcacagaaagttcgcgaaggtcttccacctgaatatgggtgcttccgtaatggcgcttccgttatcgtcatgggtgaatctaaatgacacagtccgaatacaaacagtacctgtacgatctgttcatgaaagaaacggatggtacactccaccctaagaaagccactatcgtcgtgctgtattcacaaggtgccctgtcattctcctatcttttcaaagaattggatctgatgggcattgaatataaaaagcacattacgccagaacgcactctgaagcgcgcaatcgctcactgcgtccactcggtggcgactgttatgttccgccatcacattacattcgatgaagctcttgacccacagtatcacgaagagcgttgggatctgttgttaaagaacggtgccaagcctgagcacaaagatcaactccttgggatgaccaaggcgcaactcgtggatggtgtgttatgatctatctcctgtttggtgtgccattgatactggccatcctgtttgtggtctaccaccgcaagacccatgagccgaaagagactctgattgcgacggcgattgtggtggtgctatcctgtctgattcaggtcggggcttatgctgcgttctccctcggcagttcaggggacgttgagatcctgaacggatacgtcactggcaaggagcgcaataaggtgagctgcgagcactcgtatcagtgcaactgctattacaccacatcatgctccggctccggtagcagcaagtcttgtacccgtacccgtcattgtagtacctgctatgagcattcgtatgacgtggactgggatgtgctgacgactgttggtaatctgacaattgaccgcattgaccgccgtggtcttggccagccgccgcgctgggcgcaggttcagattggtgagccagccgcccgtgagcattactacatgaactatgtgctgggcaacaaggactctctgttctcccgctcagaccagcagtttgctgagcgcttcaaagacaagattcccaagtaccctgaggtctatgactactatcgcgtcactcgtgtactgaatgtgtctggtctggcgttaccgaccacatactggaacgactatctgaacaatactctgaaaacattaggtgcttcacgtcaggtcaatatcgtctgggttgtgacttccggccagccagttgaatacttccagggcttggtctatgcttgggatggtggtaaaaagaacgacgttatcgtcgtgaccgacatcagcaaagatctgaagatcaactggggtaagagcacttcgttcgctgatggtatgcataaccgtgaactccattctcgtaatggcatggctctcacaggtcacgacatgggtgtcggtgtcatggctgatgttgtcgctaacatcaccaaaggctacaaccgcgttgagatgaaggaaatggagtacctgaagtggcgggaactcaagacctgggaagttgtggttgttgttctgctgggctgcttaccattcaccgcaattttcatattacagcgaatggagtacaatggtggccgtcgtcgttatccgtttaatttttaatcaaaagaggaagtaagaatgtctcaatctaagggtattgcaacaggttggataattggtttggctttgctgggtgtagtgattctcggcatcggtacagtcatcagctacttcaacgacttcaaccgcactgagcagcaggtcaagaagttcaacaaagactccgagaactacctgagcaactatacgctcaaagttcaagagacggcgcagattcctgacatgtataaagacggcctgaaggaagtgatcaaaggcacgttcgaagggcgttatggcgctgatggttccaaggccgtcatgcagtggatccaggagcagaatattcagttcgattccagcctgtacaaagagatccaggtggtgatcagttctgggcgtgatgaattccgcatcagccagaccaagaagctggatatctgcacaatatacgaaaccaagctggctcagttccccggttcgttgattgctggcatgttcggctacccgcgcatcgaccttgacaagacctgccaggtggtgagcgatacccgtacccaggccgcgttcgacgctggtattcagaaaccgattaacttcaaaggctgatgtcatgagcgtgaaactcactgaatccctgacactggaccaacagcaggctctgttggatgaagtagtgatctctgctatcaagcaagggattatcaaagacgacatgttgattgaccgccccgagatgatccatcatctggtggtgtgcctgggtgaggccagcaaccctcgcaagaagatcgtgctgtttactgatggtgtgatccttcaccgatctgctcctgcgtgatatgatcaacacagaacgccgtcgccaggggaagaactgtcctgtggtccagtctgatgaagaaatcgagcagagtgttcgagaagatctgaacagcacctactcgccgatcgatctggctgtaatgattgttcaggcactgtcctatgctgccaagggggaaacgaaatgaagaaatcatctgcggctgttgctgctatgctagcgctgtcagaaatggaaatcgtcgccgcgcatcgtggtgatgatatgtgggggcgtcgttacactcagggtggcacacccggcgaaccgggacatggtcgtccatctgtaacccgcaagaagaaggcgaagactcatggaaagaacaagcgcaaacgtaagtgaggagcgcctgaaggatttgtccgttggcaatcccaagttagccagatcatgggtgatgtttgatgaccgacgagataatcttccttcgagcagaggtcgctcgattaagtaaaaccgaacccaaaaagtagaggatatgttatgagttctattgaacagctgatcaccccacagtatgtgtactccaacattgttgagcacctgcgctcacagttgaacgtgggaaccctgagcagcactgacctgaaagatctacaaatcgttgaagtcgaagtggcggcctttggttctcgctatcacttcaatgtggaatacacgcgtgtagaagagcagcagtcctctatcatcgcgctggctactccagtcaacccacgcaaagagcctgtgtcggtcactcgcaccatcatcggctatctggaagagaagttggaacctggtgcccagcgcccaacattcgacttccaggcgcgatttgccaccgaagattgatccgaacaaagccctcagtcgagggctttttcaattgaagactcccaccgtattatacccactcaaccaatatgttcccctttgacattgataggatttctatactatgaaaatgcgcaagtccgagcactttatccgctcgtcgtcttccattcaggggcaggcgttcaacgtgaagatgaacgataagatgtttgagactctgttctcatcattgtatcgttacaaagaggctgcagccctgcgcgaaaccgtctgtaacgccatcgactcccatggcatgcgtgatcgtatgcaccgtatgatggcatcccactacgcgcctctcactccgcctcctgcccgccatagcaaataccttgcaccgaagggtaagcaggttgttgtgcatctacctgatgactttgaaccatggctggaaatccgtgattacggcatcggtctgccactcgagaagatcattggcgagcctatcccagcgcaggaagatgaggtgctgctggaaggcaacatggtggtcaaggaagacgagatccctgactcagctgaggtcatcggtgtgcctgcgttctataatggtggtctagtgttccgtcgcgaagatggtgaaatcattcgtacgcctgggttgtataccactctcttccacagtacgaaggaagaagatgatgatcagattggggcattcggtcttggctccaaatcaccatttgcggtatcggattcgttcacagtggaaagccgcatggacggtaaactccatcgcttcctgatgtacctgaatgccaagcgcatcccgactgttgatctgatcaccaaagatcttgaaacccgtgatcctaaaccggaagacaccgatgagttcaacggtatgacggtgaagatcccggtaaagaacgctcgcttctccgcattctctgatgagctggttcgccttggtcgtgttatgcgccctgaacaacgtccaattgttgagaacgcttcataccgcttcagctgggaagatatcagttatgatttcaaggtcaacaacacgtacatccagccgaaaggccaggggaacacccactacgctgtgatgggtggtgtgtcgtacccgattgacctggaccagctggacccggacactgcttccatcatgagcaagtttccatcgtcctatacgttcttcgaacttggctcgctgaacgtaccaccgtcgcgtgaagacctttcatatgacgaattcacgcgtgagacgctatctgaggagtttaagggcaccgccaatgcaatcttgacagaaaagatgcgtgacctggagctggcgtgtaagcgtggtcctcttgccctgtatatggagaaggtaaaactgagtgaaatgttcggcagtgggttccgcaagatggttgaaaaggaatacccggctgacaagcgctttcatgattcatattaccgttacccgctgcctgttgagattgatcgcgattatgaccataccgcgccgttcaatgagctgtcatcgccgttctctatggagatcttctatgactggggtgagtccagtaatttgaccatttcagaaatccagaagtgggttgatcgcggccagcatgttactgtggtgatcgaagatagtgttcgtgctcgtaacctgaagatcaagcaactgaaagatacagggacgatagtcatcgtggccaagccgaatacatcctatgtcaccaagcgcaaccaatctaaggacaaccctgcgttcaagaattctcaggctctctatgatttctttgaaacttggattggcaaagaagaaacgacggttgattatctgtgcttcgctgacaagttcgtcgattggctgagtgcggtgctggagcctgctgaagttaagttcatgaacgaactgacgtatgtcacgcccccggtcaccaaagaccctggcctgtttccgttcacgcgcagcaacttcgacatataccagtatgaagaactgacgggcgaccagatctcagatatcatcaacaagggcgagcgcatcgtctatattgaggtgtctggccatgcgtgtatccatcaggtgatggacagaacgttgacgactgcggcggcgcggggtattcgtaaatctctgtatgagcacacagtcagtgtcgacgatgaaggcaagccagtgtacatcagcgatatgttgaacgttcacaaccgaatcttcttggctcgtcgtaaatccgtgccaatgatgaagaagttcccagaggtcttcataccgatcgatgaaatcctgaagatcatgttagaaaacgtgaagcctatgatggagcgcgatagcgccaggcgcatactggaatcataccgccgcatgcgccttggggcggatcgattaaaatacgggagccatctggttcatcaggcgtttagtgatgttgaagacgatcgttatggcaaattggtcagccgttacaacaagttaatgaaagtcgtggacgatatcttggatgagcagactgtacgtcattaccaaagcctggcgaaagccccggtttcaatcaatgacaagcgtcgctttagccatttccaggacacaatacattctcttaacgtgaatttgtacgccaacgagcgtgacgaaaagatcttccgttcagaacatcagatgctacagatctttgaatgcgcttcggatgtgttgcggtctcatggatttacaccgtttgatatatcgaggactccttcattgaaagcaaggcgggagaaccgattgaccatcgagcgtcatcgtgttgtccggttcttgaaagagaattacaaaccaagcgccctgaacccgattgaaaaatcttcggattacttggacgttatttcaaattccattatcagggcataatagtcctgttaaccaacgtgggaactacaagatgaacaagattgacgaaaagatcctgaagtatttgaaggaaggtaaaagccagagcgcaattgctactctgttgggcataccccgctcgactgtacaacgtgttgcagacacagaactcggtgtcaacccgttatcgctgaaatctcttaccactgaagagattcagcagattcagatgaagagcaaggctggtgaaagcaaccgtgccctggctgagttctttgctgtaagcgccaagacgatcgcccgtgccctgttggtccgcattaccgaggagaaaaacaaggtaactgtgatctctcctatcaagccggaagagcaggaagtattcgaggtccaaccgggcggcacggccaaagacaaagatggcacagaatggtatgttggggcatatctaccgaaccacaacaagtatctgtgtctcactaacaacggcaatttcaaaggggctttctttgaaaagtctgaattgactcctgtggaaggtgatagttgcgctttcgatgttgaagctatcggcgagatggcagaaatttctgtggcactgtcagaaggtgcggacaaagttccgagcaacgttgaaatcagcgttgtggttgacggggaaacctatcctatccgtggatccttggatgcccgtcgccgtgttggttactttgatggcatcctcggtcgcaccctgcgtctggctctgtcttctgtagaattcaccgtcgctgtcaaagacgttgaagaagtggctgatgacaagaagaccaagcaggacttcggcgcgaaagacctggacgtgttcctgaacgaacaccagatcctgattcttcctgacagcgttgttatcgcgattgacggcaagccggaaacgatcaccacttcacacccggcctatgaccgcatcgtacaggcgatcaaagacaaagacgtgaagctggcatactcgctgatgcgcccccgtgaagccatcgcgaagtacgctgctggtctggtagacgtgtctgacaatcgcgttcgttggtctggccatgacatcacaggcacatccatcgccaagcgtgtactggcgctgatgctgaagggtgacttccacaacctggatcgcatggcgaagtttatggacaaaatgttccagaacccgtcagcttctctggttcagtctgggcgcatctatgagttcatggcgtactctgacatcgaaattgacgacgatggtgacatcatcctctacaaatcggtgcgcggcaactacatggacaagcacagcaacacgatcagcaacgccccaggcactatcgtgcggatggctcgctcattcgtgaacgacaacaactctgaactgtgttcatacggtttgcacgtttgctccctggcctatctgaaacagtgcttcggttctgttggccagcgtgtcgttcgctgtaagctgaacccgcgtgacatcgtgtcggtcaccgatgattttggttcaagcaaaatccgctgctgtgaatacctggtgttggatgactacactgctgagtacaaccgccagcacaagtctattgacgtgacaggtctgtacaagtaaccaatccccatccaccaaggaggctccggcctcctttcagttcgaaggcgagaccagggaatactcccacaagaactttcctccccgtgatgttcatgaccaacagttcgtgaaattgttctgtcgctgtagtggttgcgacttcacagacgaaggatacgcgatgcacgtatactgctgcaattgctgtggtaaatacgtaacagtctataggagaaccaaacatggcgaagaaacctgaagtcaagaaagttgaaattaaaaccgaagccccagtcgatgacatccaggcgaaggaggaaggtgtgttgcctacctacctacaacgcgccatcgataacatccctccagggggagacggaggcgtcgtctacgctggcgggtacggttgggtgtgtgaataccaagacggcacgaaggaactcctccaggagcttccagggctggctgcgaccctcaagcgttatggtcgcgacaagttcggcaagccgtttgaaaccggggctgtgattgaaaccaacatcacagccgagactctgaacctgctgggtgaagatgatctcaagttgttggctgcgccgctgggtatcacagaagaagatcgcattcagctgattgcgaagctgatcgaaaaattgcagattaaataagccggtgtacaacagctgaacttattcaatatgcctatcgttgacgaaagcaacttgatggattatgcactgaggcattatattgtagattctgtctcgtgggatgaactgctggtagacattcagcggatttcgctaattaatcaatcattgaagagatttgtccctggtaagagtcctcggttaattctcaatcaattgattactgtcttcaatacgttcgagacagaggccgcttgccgtatgctcgttttgaaggtggataatccccagttgccacgcctcaaggctgctttgttgacattaggcgtatggcgcgatgatttatgttccggttcatacgaaccagataatgagctgatgatggctctgaacaacgatttggatgagtggaggaaaccatgccaacgatcactgtattagtagcaccggaagttgttcgcaacaaaccggaaactgagcgtcttcacactgtaacaggtactgctcggggttgggaaaagaccagtcttaaccaagacccagacgagatcctgactgagtgtaaaggtctggatgcactgctgaccaagagcaatttgcaggccgatggcgtcaccaaagtggatccaaccaagcccgttggcttccagctgtcttatgaaatccacgacccaagcgctgtgctgaccactggcctgaccatcacccctgaaactgctaatggtgaagtcggtcaggttgttgaactgaaggcggtcgtcgctccggagaacgcgacctaccagggtgtcaactggtactctggcgatctgaccaaagctgtgcacatcggtggtggtaaattcaagctgctggcccctggctcggtaacagtctatggcgtgaccatcgaaggtgaccacaccgactctaccgtcattacagtggctggcgctctgtctctgtctaccgatctggccgcttctcaggatgtaacaacaggtgaatccgcaaccttcaccatcgctgctacaggcggcactaccccatacacacatacttggtacttctctgatgtccctggtggtgaaggtgaggtgatcgatgctggcactaaccccactgctgcaactgcgagcctggttatcactgcagttgctgccgaaaacgagggtgagtactggtgtgttgttgaagacgctgacggccactctgtgacctctactcgttgcgaaatggctgcggtctaatcatgaaaggcttccaggacttccttgaagactcagcagcccctggaaccacgaccgccgatgtggggaaacccgaaggcggtatggtgaaagagcctgtcaagaagcccaaggatcttgaggaagaacaagagcagacctccttccaaaagatctttggaaacatcttcaaagacctcgacctgaagaatgcgcgaaagtggaacttcaggacaggcaaatatgaagaggaatgagccgtgaacgcgatgatcatgggttaacaaaagaggctccggcctctttttcatttccagcatttggtgtataatggacccgttccccatgagcggaacctaactgaggatacaccaaatgaaatccatggtcaaacgtaaagtcgaaatctccctgactgcccatattgaaatggtccaacaacttatcctggatgcgtatgaaatccagaaagatcgccaatcgaggggaggtgtgacggaccccacctgtcctggaaacatactgtactatcgcatgctgcgccagactgggcacaccgccgcgctgaagaagattctgtcctatgatttccagacagagaacaacctcaacatcatgggtgtcttccatagcgttagcgaacgcgattctttcttccgctcccgagcaggcgcggatgtatcattgcccgatgtagacaagaaacagcacacgacaaccatctcccattacatgggcacgggcatcgataaagcaaacatcatcgtgttctctgatacgttgcatgaccccaagcgcctcgcatctgcgcatgaaatgctgcgggaaggtcgcagcgccctcactaatttgactttagtagtgtttctgggctagatagttacaggggaggaaactcccctatttccctaacaggaggtgcgcaatgtacaagttcagaattaacagagaacgtaattcgttcaaattcggtgtaatcgctggggtgtgtttgttcctggcgctcgaaagcgttatcggcctgcttacaacaccacaaatgcaggtgactcgttaccttcttgccattatattttctgttgtcggtttactctgctcctatttggggtgtgtgaagaaataaactggctgcacacagcaatactttgatttgagaaactacatcatgatgctgttaatgagcgttccacagaacaagatgacccctgcaacagagggtaagaatcacttcaacatctacagccggagccagacggaactcgggcgcttcctctcgcattttacccatcatccaatgactacccatgaacatggtgtgtttaactccatggaggggtactggtattggctgaagtatagggatgacaacctgcgcctgctcgacggttatgaggccaagcaatatggacagggattggcggcttcccgcgtcattgtcctggacccgtctaccgaagaattcaagcgcgatatcctatttgcaactagcatgaaactccagacaatgcctgaacgtctgaagatcagattggcgtacagtcgcctacccctgatccatgcatatgttcagaacgggaaatacagttttcaaaactctatggactatatcattgcccacattaatcgtctccgcatacaaggaactttgaaatgaaatttctacacactatcgtcgacacttcttatgactgtactgctcataccccagaccgttctcctgtgtttgttctgaacaaactaggtgaagagatctgtgaactgtctgatgtgtttcatggcatagtatcttccgagccgttgaatggcgaagttgctgatgtcattatctctgctattgaccttctgtacgtcatggattatgacgacgtccaaatgcgcggctctctgaacaaggccgaaatgatcgactctgtcatcaaccacatggcgacagtgaacgatatttcttctaatctgttggaagaagactggttccgtctgattgatcgtgatcctcaaaagcatctgaatcttattcatcattatcatggccggattatccgattgtgcaaccagccttatcgcagtcaagacagattggatcatcttgtcaatgacctaatcaagcatgttgcgcgcatggggtgtggggaaggggcgatccgtggatcctctttggtggccactcgcattaaagtggagcacgctattgaacacaaggttgaaaagtggcgtagcaaatttggtctataagccgaccccatacataatcttgtgtgtttaccattgacgggataggccgatgtccaacaaaattgatattgaacgcaagtacaagaagctcactcacgttgagcatatcctactccgcccagagcgtcatctgggcagtattcgttcgtctgtggggacggtgtgggtgtatgacccaactaaggacaaagtcatcttccgtgacaactttgagtactcccccgcgctgatcaaacagtttgatgaaatcatcaccaactgtgttgaccacagcaagacccctgagggcaaatccctgacggaaatcaccgtcacagtttccccgatgaacggtcaaatcatcgttgctgacaacgggggtatccctgtggtcaagcatggcgtcaccaacgagtggcttcctgaaatgttgttcggctctctatatgcgggatcgaacttcaacgacgaagacgaagagtacaacaaccagaagtccggtggtcagaatggcgaaggggcgtccctcgtcaacgtgttctccaaatggttccgcgtcacgactaatgacggcaagaagtcttatactcagacgtttgaagacaacatgagcaagaaatctaacccagtcatcagcaacgtgaacagtcctggcacatccatcgcctggatccctgactatgctcgcctgggcgttaaaggacttgaccagaacaacctgctgatgatctatcgccgcgcgtttgaagtggctgcgtgtaacccgcgcctgaagattgttctcaacgggaagcaaatccggattgaccgctttggccacttcgttgattacttccatgctggttcggctgttgacgaaaccggggattggtctgttgctgtagccccttcatctggtacgttcatgcacgcatcatacgtgaactctattgccacccacatcggtggtcctcacgttgattatgttgccgaccagatcgtggcagcgattcgtccccagctggtgaagaagttcaagaccgaactgaagccagcaatgatcaagaaccacatgtccttgttcatcgctgccgacatcaacaacccgcgctttgacagccagaccaaggagcgcatgaccactcctgtcagccagttcggtacgtcgtacaagcccagtgataaactgattcgcaaggcgcttgagttcgttacggctggtctgagcaaagaactggcttccctgcgcaatgagcaggatgatgctgagtttgaaaaggccaagaaggacatcagcaagcgggattatcgtgagattgagaagtattacccggcgaccgcccgtggtgaccgcagcggatgctccctgttgctgacagagggtgatagtgcctccaatcctatcctgaacgcccgcgacaccaagaagatcgggttgttcccgcttcgtggtaagttcatcaactgcctgaacgccccgcgctcaaaggtgatgaacaatgaagagttcaagaacctgtgtacgatccacggcggcgcagtgccaggccagccccttgatatcacccgttacccacagactgttgtggctaccgatgcggacgatgacggcattcacatccgtgggttgttgatcaccctgtattgcacctactggccggagtatgtccgtcagggcaggctgaagctcctgcgcaccccttacatgcgtgtgtggtgtggtaaggtgatgcatgagttcatgaacaacgcagagtatgaggagttcctgaagacgcctgatgccaagaagatcacgaagaagaaatatctgaaaggtcttggcggtaacagcactgaagacttcaaacgtattctaaacaacctggatgcgtatactacgacggtcacgctggacgatggttatcaacagtcactgaagaatggcttcggtgatgaggccgccgattaccgcaaaacctggtttagcgatgtttgtctatttgagactgaggatgaataagatggttgctaagagcattactgtaacggactttgtcaacactgaccataagcagttttctgtggtcaacagcatccgtcaaatccctcagctgattgacagcctcaagccaagccagcgcaagatccttttcgctgctcttgagtacaacaaggaggagatcgttgaccgccttggtatgttcgccgccgctcgcaccaactacaagtctggtggggagaacatgagcggcactatcgtgaacatggctcaggggttcccaggaacgaacaacatcccgtactttgaccgcgatggccagtttggttctatcatggggcgtgatgcttcatctgcccgatacatatccgtcgctgtatctgacgttatccgcaagatcttccgcaaggaggatgagggtatcttggaatacaactaccttggtgaagaaagactggagccgaagttctttctgcccatcctacccatgttcctggtgaatgggatcaatggtatcggcaccggatattccaccgacaccccgtgtcattgcgttaagtccgtgctgaatgccctgagagcgcttctccgtggcgaagacccgaaagacttaaaaccgtactggaacggcttcaaaggagagacaggctatactgaggaaggaagagcatacagtcgcggcatcttccgtcgcgtcaatgccaccaccctgcatatcaccgaagtcccagtgggctggtttgccaaaacctatgagaccaaggtgttgctgcctctgtacaaggctggtatcctcaccgagtacgccaacgacacgacggaagatggctgggatatcacggttgtgtttaagcgcggcgaactctctaagctgagtgacgagcaggttgagcagatgttcaagctgtattcggccaccaagcctgtgtggacagcatgggatgaagacggtgttattcatcgttattctggttggcgggacatgttgctgccgttcttcaattatcgcctgtcacggtacgaagaccgtcgccagtatctgttgaaggacatagcagacaggatccgcaagctgggtgaccgggcggtgttcattgaatgggcgacgcgtgttgatctccgccaaaagattgacgtgctgaagtctctgttcatacaggactacccggactttggtggtgatcttgacgagttgttcaagatgcctctgtcgtctattactctggacgcccgtgagcgcctactcaagcagattgagaaccttgaagcacaacataaggaattaagtaagaaagaggacatcgatctttacactgaagaccttgatgaccttgaaaaggctcttggcctatagcatcggaggggttcgcccctcctcacctggagggttgtgctatgttctatctccgttctgcagcacctgtggtattcatcattttcctatttgatttcctggttcctcgctttatcaaagaggaggtggcgtttggtctctatggtgagacggaagacccagaggtcgatgaatattacccaatgtgcgccctgaaagatatcgaggaaggggaagatgttgcaatggtcggcactatgcgttctttcaacctgttcgggattgcactctttccgaaactggttggtgaactgcgcccctacgttcctgaagccactgtagatggttgatcataacatagcttctgagtcctaaacttctgtctatggatgtttccttgtattttcattgtcctgggtgtgatatacttcatctgtatcgcattaagggcgaaatccaaggtcttgatgtggatgtggaacaacaatattattgagcctacgttcacaccgagcctgctggtgaatacaactgatccagcatcattttgccatccgttcctgaccgacggcaaaatacaatttctcggcgactgtttccatgatctgaagaaccagacagtggatatggtcgacatctctgaacctgaaatttggattgaatagattatgaaattactgggatattttcgtgaactcccaacgggaactgaaggcaagttgttctcacaggtgaagggggatgacatcggtgatacgatgattccattgtacactcgtgaacttcctgtcgaaggtgcctgggagcgccgtgtggtcgctgccgccaacaagtatggtgatgtaatcgtcgttgctgaccgtcaccatagcaaattcatgaacagccagctcaagatcctgaaagaagcaggcgtcattaaatccacccatacccgcgaacagggattcatcgacaaccagggcaacttccttactcgtgaagaggcatgcatcgtagcccgtgaagctggacagatcaatcaggtgcgcctgaagacaacccctttccgcgaactcttttccgaagacctctattgaagaaaaaggcggtattattaccgcctcgacctcttgtttggtaacatcaaatgagcccagaatttgaaaacctgttcgagcgatgcttcgaaccaggttctgtgtccggttacatggaccgcctttgcactgccattgtaatacgccttgctgccaagggtatcgttgtcaacaccattatccgcaatgggaacaactttatcatgcagatgactgattatcaccaccgcacaggcatcatccaggtgtcatgtgttgacaacagcatcattgaatggagacagtacgcatgaccacatatgtaatcaatggtggcgatctactgaaagccgcctgtagcttcaatctgatcgacatctttgcccacggtgccaactgttggtctaccatgggcgcgggtattgccctgcacatcggcaacaacttcccagcgctgcgcgaagtcgatgctaacgaccctcgtggtccagagcaacgcctgggtggtatgtcctatgcatttgaccacagcaccggtgtctggggcgcgaacctctacactcagttttatccaggtccgaacgctcgcatgccgtctgtcatcagttctgttcagaccctgtttgagcaggtgcatgaaattgtggaagcaactaaagacgaaactgtctatgtcggcctgcctgctatcggctgtggtattggtggcctgaacctctacagtgtagtgcgccatatcaatcgaatctctgaaagcgtgtatgaagagacccgccgtcgtgtcgtcccagtcttctatatcagggaaggagacgggttcgatgatgatctgatggaactttctcatctggacacagaaggtatcatgattgtcgaagatgagcaagaaatcatcgacgaggaggcgtaaatgtacaagtctaatttccttgcagttgccgacagcgaaaccctggggcgctgggatgatgcagtcatgctgtcttgggcacacaccatcgccgacctgaccaagcgttatactcttcagcagctggttgaggagcgcacgacgttcattaagctgaatgtcaaagagcagctcgaacttggtcgcgtgaaggacgctgggacagttgaatggtggctgggggcgggtaaacgtaacccgtgtgatgcggctcgcgtcgtcagtctgtatcccaaggaagatgacatctctatcttccaattggccgatgaaatccgcaagggttgtcatcgtcttggggtagacccgcgctcggttgactggtgtgaccgtaacttgttcgatctgcgcaaggctcagcacatcattgaggtgacatgtaagcaggactccaacgagccttgggattaccaccacaccttcgacatcgtgagctggctgaagggtgttgggcagcaggatcggtatgctggcatcaaggcatgggaactggaaggtatgatctatcacgaccctcgttatgacgctgcgcttgactggctgcgtattcagaagaccatggaagatctgatggggctggaggttgtgggatgattgtattcactgtcatcggggtgatcgtaacagctggggtgttcacagccatattgggctacctgtacttcatgttccttcatccgttatttcaggcgttcagtctcacgaattggtacttggcctgcctaaaggccgacggcggcgtgaacatggcctctcttccttactggcggctggtggcgcattactacacggtcggtggctggcctggggaaaggacatggaactctatcggtgagtggtatggaataggtcgatggcgtatattccctgatgaagatgatcaagccccatgaggggcttttctatatccgggatagagtatcattggttcaccaacgaatcctcgggagaggcgatatgaaacgttcggttgttgtaaatgacatcacgagattgataaaccttgtcaaagatgtgtttccacaacaggtggatgtcgagtacgtggggaagaacgggaagtgttaccaggtcgctctgttgttgaagcacgtgtaccctcaagcagagatccattacagtcagattgaaggtcatgtgtatactctgattgatgggcattactacgacatcgaaggcatccacttcagtgtcccaccggatacgtgtttgctcgaacacaacagaggccataaaccccatcgctggcataaagggtttgtgaacgtaccgattttagaatggttgaggagaccataatggcaggaattgtgaagtatctgggcgacacccaccttggacacaagaagatcttcaagccccgtgggttcgatacccaagaggcgcatgatgctgcggttatcgacagtatctttcaggggctgaagtctcgagacgtccttgaacttgcaggcgacatctgcttcatcggggctgaggggttcattcgcctgatgcgcgagggtgccaagcggaatattgatgagttcaagcgccgcccggttcccgatgactggcgaccgaactttatcatcagggtggcgcaaggcaaccatgacagcttcaagatgttgatgaagctgtatcaagagggatggattagctcctttggtgcgatgtatgagcgtgatactccggttggtcgtgtgctgaccactcacgttccttatcaattagaccgctgggcgtataatatccatggtcatcttcacagtgaaatgcgtgaagaacgtgaatacctgaactgtagttgggaacaattcaagcgccctgtaaccctgtctgagttgttatacaccaatctggggattgaaatatgaaaatttattttcctggccaaaaagtgccttctgaagtgcagaaggtcacaatcacaggctaccggaaaggggatccatatctgcgcttctcctctccatgtatcgtgaagcaaactaaaacgggttattatatcaggccaattgtgttgatgggctgtgtaatgacgttcagagcttcctgtgaacacgttcttatacaaggaagcccgaacatcgaaggtggagaaacccacacgaactgcaagccaattatcccgacatggttgattattggtgtgctttccgttttagctctgaaaggagtattgtcatgaaaaagccgcgcatcacaggacaccaactctcggttctctacgggatagagaactttgagaaaggtcattaccgttatggtgaatggtacttgcatcccaaatcctgggccaatgacaagggcaacaccgtctggacgttccaggtatgtccgaacactggtggtttcacctccgttaaaggcgacccatgggacacccgcacaggggcttccctgctcgccaaggggttgatcgaaccagctggctcaatggttcatgacggttcttacgtgaactggccgaacactgaggtgacgttctatcgcctgaccgaactcggtaaatcttatctctgaataaagattcagcggttattgaagaagggggagtatatacttcccttcgtttattaagaggaaccggaaatgaccccattaaaagaaatgtatgagcgtctggctgaactacaggcgaaggaaaagcgcttctcagaagaagagacagagctgtccgagctgaacactttgatcgccactcgtgagaagtacctgcagcgatacattaatcacccgccgcgcatggtagaccgcgtcagcactatcatggacctggatgaagttactcctggcaaagaaatcattgtcagggaagtccaccagatggtcgccatgggtcagatctttggtcgtgcagaccaagacgacatgatcttcctccttgaaaagaaactggtgatgtgatggctatcaaaccccgtatgttatttgcgcatatgcgctcggctcatgcatacgctctgtccagctatgcccagcgcctgaaggtcggctgtgttatcgttgacccgcgtgttgaccagcccctgtctatcggttggaacgggactgctcctggcgctcctaatgtctgtgagaaggaagtagacggtcaactggtatcggtgggtgttatccacgccgaggagaatgctctgagcaaactcccccagcacaccgaagactgttgtggtctggtgatgtttgtcactcatagtccatgcccagagtgcacccgtcgtattatcgacagtggcaagatcgctaaagtgttctatgaccgaccatatcgtatcatagacggcattattgaaatgctggctgctgggattgaagtgtatcgcatggtcgatcagattgttgtagtccagcattctgtgaagaacggcgaactggtatccacccctgttttagtgaaccctgacaaataaggaatttatcatgcgttatgtagatcgtatgctcggcaaagacgagcacgttattgccttcacccgcccgacctggtggagcggtttttggatttatgttctggttattttaacgtttatcccaacatttggattcagcttgttatttctgataccaacagttttaaatgtattgacaactgaattcgctgtgactaacaagcgtgtcatcgtcaaacgtggtttcatccgtcgtgatgctgatgagttgcgcatcggtaaggtggaaacagtgaaggtcgaccagtccatcacaggccgcatcttgggcttctcaacaatcagcgtgatcggtacgggcggcacccacctgctggccaagggttgtgctggtggtaatgcgttccgtcagaagatctacgatcacctagaagactgattatgatcatttcaggttacaccatcgatctttattgtgaatgctcagattgcaaggcatgcagttgggcttgagaagaacatcatcccaagtgcgggttcaaacaatacactggtgagacttggggtgagtgtgtcaaacaggcgcgagcagacggctggcaaattgggcgcgacaggcatacctgctacgcccctggccacaaaagaagttaaggtaatagaagtccatcatcccgctccgttggggcgggtttaatctccttccgcatctgttccttcagcaccctgacacgctcagcatggcgacggtcttgcatctccatatcccgtttcttcttcgacttcagctcgaactgtttacgaacatccggatcttcacctggaacaagatgctcttcggtccatataatgaacttccagttcttcttggcacacagttcgcgggtggcctcccacttggcagagttgaccaaccaggttcgcatcgcattgttgaatgtcgactccttcatgttcggagtcttcttcggctgcttgatctggtctttgggcttgatctcaatgagggtgacctgtagttcctcttgcccttcacggcgcgtccagaccttgaggtccatgaagtaacgatgggtgcgcccgtcgactggggaaatgtaagggattacggtctcctcactagaccacttcactatcgcggagttcatatcacagaacttgaaagccaccaactccagcgaagagcggaagatgatgttattcacattcccctgatacttcttgggattaaccggggtgtacttcccctgaagatagttgctcataatctagtcctaaatagccataacactctatctatttaagggctgagaccatggccgacttcaagaagacaatcgataagatcaaggttctgaacacgaagggattgtcccaggctcagaagcaattgtcttatcccctggacgtcacggggggtaagaccttgggacactatgtcctattcaacatcaaccgcatctccggttcatcttatggcaacacggctactcagactatcgagaacccaatacagaaccctctggggaatactcctgtggtctatgggtccaagtctggttccatcaccaaatatgcatgggcgcgtcacgttcgttcgaacgagtctatcgtactttgtatgcccgagtccattacaaccaactatggcgttggctggaatggtagtgagctggggctggctggtatgggggcacagttcctttcccgcgccgcccaagacatgactcagtttaaactgggtgatgcgctcaacgtcgggaaggagatggggcgattcgctgccaccaaggctatccaatctgcgtcggaggctattccattcctgccgagcattaacgcccatgacacccttgagttgttcacaggcaccatgaccaacccatatgtggagatgatcttccagggtgtacgcaaccgtgagattccatttacattcaaattcacgccgcgatctcagaaggaagccaagatggtccgtgagatcatccgcatgttcaagatgcatatgtacccagagtacaagtacaacaagaattccagcgcgttttacttgcatccttcaacattcgacattacgttcatggtcaatggggagcgtaaccagtggctgcaccgcatctccacttgtgtactttccaacatgttcgtcaacgagacgccggacagttcatatgcggttcacaaagatgatggtatcgtgtccacgcaggttgacatgaccttcatcgaactggagcctctacataaagggcgctttgaaaccgaaggcgatagcttctaagagaggatgccatgaaatattttgagaagtttccacttgtttggcatcaattgcaagatgtccaagagaatgatcaggtgctgttacagaatttaacgcgccgggtgatgatcttacagaaaattaaggacatcgaagggcttctcctgccgtatacgatccaagatggggaaaccccaaggtctttcgcagaacgcgtttacggatccttcgagttgttttggataccttgtctgataaacggcatcatggacatcaataaggactggccgaaaccggaacgccgtattgttgaagaactgactgcagattacggcatcgatggtatgtgggatacagcctattatgtcgaccagttcaacaatgtgaccgacgcccgtgctatcaaattcgcatataacctagacctggatgagccgtccataattgctaactatggcctgacggcagtttcataccatgatgatgcaatcagtaagaatgaagccaaacggaacatccaagtactcgacccagattatgtgtcttcgtttgtcaatcagctggagcaggagttggcgaaatgatcgaaaacagagagacccaagacggtattgtaacaccgtcaacaacatttgacctgaagtatatggcgatactccctcatacaccccagggcggatcaccaacgccatatgacctgacggcgttgtttgaggagttcaacgtcttccaggatctgggtcttgaagggaagtcatctccatcacttacagccaatgtcttgataaaagaagggtgggacattcttgacacaatgcctatcttgggtggtgaagaagttgtggtgtcattcaagagtccggcggcctcggaatacaccactctctccctgcgcgtagcgcgtgttgggcgcgtagctgatgagtccaacagctcgtccaagaaagcattctggttacacatggtgaccaccgatgcctataaggacagcatgatccgctgctccctcggtcttgacggttcgtactctgacatggcaaaggtaatcttcaatcagctggagtcgcgcaccaagttcgaagacatcgaccagtcatatggaattcaagagcggttcgccaccccgctctggcctgtgctgcgatctattgattatatggcgagccgttcttatgacgaattgttcatgccattcgttttctatgaagacttcaatggctatcacttcaagagcctgacgacgttgttcaaccagggtagccagtcattgacagcagaagagaagcaggaactagctcagcagaacaagttgttccgtgatcctcaggacgcgccgctcatgcaggataacaacttcaactctgagcgctttatgcgcacgatcatcaaggcagagaagaagctggcgcgtgaccagttcatggcaaactaccgcgatgtcctggcggtgaacgagcgcgtctacgactttgagaccaagacagtcaccccaacacagcgcatctatactgagtggtttgcagagacggctcaccttgatccgttcccgatgttctcagatgaattcaatcgtcagaacgtccgttacattgaagcccagccggatggagcggagcagattgattatgctcgtcgtgttatcaacttcagtcttgccagcactgtgatgcgcgtgttgctcgttggtgataaccgcctgaacgtcggtcaggtgttctacgtcgaagaccagtccaaccgtcctaagaagaacgaaaacctggcagagttaagtaagctatcgacaggccactatatcgtgaccaaagtgcgtcacaagatttcccgcctgaccaaagattatcagtgcatcgctgagattgccaaggacagtttgctggagcaggtgcttccacctcagaccaatcagacaactgcttccaccactactcatcaggcgattgagaaaggccaagcacagaaggtttaacgaggtgacccatggcacaggaagcaacgaacaatgatgttgtcaaagttctagacaagatcaaggcggagatgatgcagcgcaaacaactccgtgctcagaatgaaaccaacagacagcttgaccggatgaacaagaatctggccaagctggaatctgccactaaacaggacaccaaggccgagtccaagccatttgaaatccgtatcccgacagtcaatgagatcgtcatgggattcgctcgcatgtctccgatcttcacccgcgacttcagcgtatggatgaaggatactgtcgatgtgggtaacgaaggcaatcgggaactggagaatatcgcaggcaagattgaccgcctcggtgagatcacccgcatgccaacagatgacacgtccctggagtatcttaacctgatctcagaccagctgaagtctgccaatgatgacaccctcaagcgcatggacgagcagagtgtgtctctggtccgcgtgggatcattcttgaacatgatcgacggagtgatgatcgaggttcgtgacgatgttgctgaactgaaaaagaactccgatgacacccttactcgcttgtctagcattgaaaacaagattgggcgcacgggcggtcatatcgttggagtgttgacacgcatctttgatgaagaccagaagtggcgtgagaaggacgagatgcgccgtggggaaaccgacaaagaaacgggtggtcatcctcaggcgggttctgttatacccaaagacgatgaccagaaagacgattcctccggtatcggggcggcggtggcggccatgcttggcctgaatgcactgaagggcttcttgctcaagccgttcaagatcatcggtggtgttgtcgggactttcctcggcatgttctccaagctgggagaaggtatcaccaaacttctgggtccatttgggaaggtgttcaagttcctgaaagtcggcccactggctctcctgtctatgatctgggacttcggtaaaggcttcattgatgcgaaggagatcctgggtaaaggtgctgtcacgatagttgaccgagtacgggcggggatatcagaactggttggtggatttggtgatctatttgattgggtgtccaagatctttggctttgataccaaggcgggagaaaccctgcgcaaatacaccctcatgatcactgaggctcccgctcgttggctgaatggtattatcgactggattagcaacgacttgtttgcagggatcgggagagacacgtctcttacggatatccctggcaagttagcagacaaccttcagtcggaattgataaagctggtagactggatcacagggggtatcagtagtgtgatcgacgagggcatgggtgtggccaacaaggttattgacgaaatcaagaagggatttgccgaaaatgtgaagaaacctttcttcaacatgctgaacacaatcaccaatgcgatgtttgatatcgttgacaagttcgtcagcatcatccctgacgctctgggtggacaggctgcgaagcagaagatggatgaggctcgccagtctatgctgattgacactgatgagaatccgtctcctaatgtgacagagacccagcagccacagacaccagcacaaccgaacatcgatccacaaacgctgactccaataccttctggtgcgtcttcggatgacaagaatatgactaatgaccgcacctctcagctgaaagctgcgtatggttctatcgggggtggtactctgggcggggccatgccatcacaagggagggcgctgtctaatattgagcaagtacaaggcggctattcaccgcctccagccagcgtcgtgatgccagtacagcagaatgtggatgcttctaagaggatcaacacgaccaataacttcaacagctcatatcttgagcctgagaacaaaacagataattcccgcatcctgtgggaatggtaatcagattccgtgggcttgtattagctcacggagtctctgttttgaatatgtggtatcctcatccggaaccacagcattcgtcttcctgagcaagaacgcctctgagttccagtagatgtcatcacgcagaatcgtatcgtatagatgaatgaacccaacgatcttgttcagaccgacaaggaaccaaatcgggaacttcttgatgatgatgtctgttagcaacggtggatgacctgtacccgtccccttgatgtactcaatgaaggtgcagttgcgctcccttatggcagggatcatctcccgctcgaactcctcaaggaagttatatgtgaagttctcgtacaacttacggtattcatcataattggcctgagcctggcgtgtaagcaatgtcgtcacccaggtcttgggtgatttgatgaagttggcgatgatgtagttctctaccacttcaccctgtgatgactcgaaccgacgggcaaggcgagcaaactgtttgcacacggcctccttcgccaagaacgtctcgaacttgtaattcatcggtccatacaagctgtaatcgaagtccttagtggtgaagtgcagcttgatcgccatgaagacacagtaaacgttgaacgcccgctcgaactccatcttctgccactctgttagcatttgcgttcctcttctttaataaattgcaataactcttccatcagccctttcttcttgatgaactgtaacaccaggatgaagcgacggaaggagcgggggacaacacgataacccttcgcccagtagttcacaacattagaacaatccaataaacgagccagcccagattgtgacaccccgaggctcagcagaaccttgtacatgtacttcttgtcatttaccggaagctctttcattcttaaactcatgatacttgtccgctaatgtcttataatatttgttaggattatactcctgtttggaatagtgaagagtaagggaagcactcagacctaggataatcacgacaacgagcgccttgtggttattgatctcgggaatagctatccacaccagcaacaacacaagcgagctgacaaccaaggacagtaagaacgttaatgcaatcaccaatgcgaatagctcgtccatcagatcacacctctttgtgattcttcatctcgcggacagtgcctacaaacccaagatccttcccgcaatgggtgcagatagcatggcaagcatggttctcacgataggtgctgtgtttgcagcgccattgcttgaacgccgaacgggcaactaggatcacggcgatcaagaagacgatgccggatatctgaagttcaaccaagaacttcgcccaccagaaactcatgtactcacccattatccttctccaacaggaatgcgatgttttcaatgtacgctttctgtatcgcatagacttcatccagtgtgttggccactttcttgtcaatgcggacttctacaaggcgaggcaggaacaaagacttcatcgcatcatctgtcttatcctgtacgccattggagagcactgcggcgatcttgccaatgtagtcgccctggttctcccacatatggcgtctcagctcatctgagatccctgatacaccaacaacaagcaggctgtcggaagttttacaaatcagtgagccaaaagtcttggcgtgtttgcctttcttgtcggcctcgttgaagcccacgatttcaaggtcacactcaacctccatcttcagcttcagaccttcagaagaagtaccatcttcccaaggcatgtcggcggccttacatatcgtgccttcttctttgcgagccagcgcgtctttgaagtggtcgacggcttcggcaaatgagtgaacaacgcgggtttcttgaacctgaaccagaccgtcgtcttcatcaaacagttgctggataatatcgaagcggcgctcatacggggtatccacgcgctgggcgttgaaccagttgtcgtacgggataacatcccacacccggtagatcacccgataacgatcttccaggggttctcctgtctgaatcacactgttgagtttaccgttaccgacagcacgaggcaggatggtattcgacttgaggtcaacaacgagaagttcaccatggaacacactctcaccaatccccgcatcgtagatcaggtctttgaacaccagtgaaaggttatcaaccgaaccacctgcgataagggaaccggagcgagagcgaatctcaggctctttattgtaccgacatatgatgttggcgaacataccgtctgacttcagctggctgtagacgccgcgcttgaagtccatcttcttcagcaggtcaatcgtcatgttgtcataacgatgatatggaaggatgttgatcaggcgtccagtgcctccggcggcgttgaatgcagcgttgatgcccttctcagcgatacccgccttgatatcacggtctaggatcatctgaatgagttcgtggtattggggatccatcttcagggcgacagaggccaacagggcatcagccttttggccaccgacaaggcgctgcgccatctggtcgaggacttcatagacttcgctaatgtcatcagttttctcacggacgagcatgcgaggatacgcgctgagcttcaactcagtccgatagaacgacgtcattgggtcatagacatattgcaggaagtctgccaagtctgggttgttcttgaatgcttcggtcagcacagctttcttcgcattgctgcctttggtttcgcgaagtcggtggactatttcaaggatagggatcatgtggtgtctccagggttatatgtgctgctattataaccctggggacttcaatagattattggcgggtgcgggattttgcttggctgataatgaccgcaaatgtttctgtatccatcatgaaccctccgcccagacaaagccgtatttgttcagtagatccacggtttcaccacgagcgcgagccacgatggattctactgattcttccacctcgagtggtgggcaaccagccttttcgtacgtgttaagcaagagagcaagttcttttacaaactcttcttgttcctctcctccaaagaaccacatccgcagatcgtcgcgttccccgtgcttgttcagagaagccatattcacgtacacgtaatcgtttttctgaacaacgtcatttatctccggccaatgcaacccagtcatcgcataattgaagaattccgaaggggtgacttcatccgacaaataatacaaacggaagtcaccgctggggccatgtttgcaagttctatccagcattattttgtggatgtcaacacggtctcgcttcaagacttcccgtttcttcagtcgacctctcagccaggcactgccaatacacaaaagaacgaaagcagtagcaccagtgagtatgttgaaagaatcaataatggtcataagatcccccgaagtgataaaggggtataagcccctccgatgttatttgctcaggctggcgaggtagttgtcggcttcgatagacgacgggctgttggcggagtagcccgaatcagcgatttcggtttcgcgcaggatggcatcgatatcgatgatggtcataccagcggcataatcgatatcttcagggagcaccagacccaggtcgttggtctctttctgaacacgaaccagctcgagattggacttgacttcgtccagtttgtcacccagctggataatcacaccgttcagtttgtcgctgcttgcttcgatgtccttcacctgagccaacagggcttcaccgatacggcggcgatgcagaataatcagggcgtcggcgcgggttggtgtgacaccgcgagcgatggcgtccttcagaacttcttcgcgcttggcggcttcactcaggttctgttctgcggtcttcttcagcttgacgccgttgcggacgttggtgacacgggcttcctccaggcgacggatttcatcagacagcttgcgagcagccaggttcagacgcttttcggtgtcggtcagtttatccagacctgtggtgacgttggcttcaacagtggtgaagatgcgtttcagtaagtttttcagtgacatcagtgtgtagtcctcagttatttcttcgggggttcaattgaggtgaaagaatccttccaactcttgaatttttcaaccagggcttctttacccagctcgtcatttgacacgctgtgaatataggcgaatgctccatagccggatcttggcatagccttgcagatgcgcagactgaccaaagaatctcctacggaaacaagatagtggtcacgacgattgttcagggcataatggttgtcgtgaaacttgtcaacaataacacagttctgaggttcgacgtcaatcggtagcccgttggcttcggatccgccgcgcccaagtacgcagcctgggaataatgtttctacgagtgtagtcatggtctgttccttctgtaagttcccatgtattatatgggtgaatagtttattgaattatttgttatgaaacccagagccttgtggacttcttcacgatttttaatttcggcctgagcctctgtgcgattaatctagcgcttgtgatgtcgggagagggctttgtaaacagccttggcgtcaatggcatcgattagacaacggatctcagcgcatcaggggcttgccaacagccaattgaaatacttgcgcatgtcacttcctcatcaatgagagcaggttgaccgtagccggacgcgcatcaggggcgtagaagacgtcctgagagtgcctcttacagcacgggcaatccttcgtggcgattacacagggagccttgtccacggcaaatccggcggcttcggcttccttcacagtggtgaatggcatgtaggcacttgtgccctgccctccgcatgaacattccatcagcgtttcctcttaaaggggatgaccagggctatgatgagaagcatagctgtaatcatcccacatgctatcagaccaaaggcgaacgacttcagaacaaactcaatcaaatttataatttcctcaatttggctctagtgacctgagtttgtttaacgccgttgtactcagccagttctttgacacgaccacggatgatcatatcgccctgtaagaactctgtatccatataagaggtcttccaggtaattgtattgccttctgctgttttgaaagtaaacaggtaactatcaccatattcattggagaagaggaaggtgcgcttgtcgaacctgacttgcacttccagcatttcaccgacttcacccacccatttgttctccgccttgcggtcagtacgaggacgatggatgtaatcgtaatatttcttggcaccccagcggactgtgttgttatccttgatgaggtgatagccgggttcacacatgcgtttcaggcgaacattgaactcattagattcggacagcgcactgatgaaaagcttcatatggtacatttccgactcggcatcttcacggtattcgtgtgccttgtttacgaaatactcttcatcggaacctgcttttggtttctggtgagaccggacatagcccagtactttgtcaaacagttcagacttgatatccacgcctgccagcatcacctggaagcatgcgcgcaggtaactgtgggtgtcggtgaagcgctcattttggacgcgatatataccctctgggtcgtcctcgtctggcatgaagaactcttggatttccagatagtaagacataatcgcgtcaagggacttctgatgaggcacataatgatgcatacaggtgctaccaatcagcatctgggtgtgcgtttcctcattttcaatcacatatgtgttcttgcgacggatggctagattgcaatgctgacaccaagagacgttctctgcctcgaagcgacggatgaagtcgggattgatgttgtcggacaggcggttaagaataacctttggatattcgtgattgaactgaccgatgatcttccagccaccataagagatggggcggtcaatgccttcgccttcgagagtaacaggtttccaccagtgagtaaggatctcaccagtgaagtcgcgggtgtgggttttgaagggttcaccataagtcacagtcggaaacggaacacccaacctttcggcagtgcgctcgagcttcttcagtcgctcaactaccaacccttcattgtcgatcggaatattgaatgttttgacgttcatttccagcctcatgatgtagttgtaactcttcaatacagattaaatattaggcgattatttcttgaaagtaaagttattgaagttaaaaagcccagtacttgactgggcttcttggtgttcgattgacttattcgccactggcattcggatctcgatcgggcttggcgttcgggaatagagactcgtataagtcttgatatttctcgctcgtttcgatcgtcttatggtaagttccattggcgcggtcggatacaaccttgcgcaaatcgctggccttgatacccgtgtctttcgccagctcggccagagtctcagtaatgaaagtctgttccgacttgatgcggacctgggcggcacgacagttttcaattgcacctatcagcttgcgacgggattcaggatcagatggtagtacataaaatccgatttgttctacagacatttggtgttcctcttgttaagatctcataccttttgggatcagattagtcccgtaacggcgtaaaaagaagtttacgattgagtgatactggaacttcgggatgatctctacaccatcttccgtcgtataccattccactgtgttggtgcgcactggaaggggaaatgacggcagatccagctgtacgagttcaccctcttggcatatcataccaattccatattcctcccagattttacgattgttgaagaactccagagtctgctccggactcagctcaatcgcttgtttggtgtggcacacctgtttggcggcctgcaccaggccagccataaaatcattgtgtggcatgatgtgctcctggtttacattcagatcatagaattataccctatgacccgccttattgaattgcctagaatttccaattattgaccgtttgggctttctgctcatcgctggcagcagccccggacttgttgaggtcatgtttgatgtgtacgttttcgacatatttggcctcagcctcagtcaggtccttcttaacttcgttccagtccaggtcaaacaggatctgtttgtcttggtccataccaaacaggaatgatttcagcttctgcttgttggcataacggttcttgagtattgaggctcgggctttcttgaccgccgccagttcgtcaggagcatagaatgccatgatgaagtcggccaccttcggaataccgatagcatctgccaaatcactgattccaccatcagtgctattctgattctcacgattgaactgcataccagtccatacagggacatcaaactcaaatcccagcgcacgaaactcacgagccacagacgtgtaatagacgttcgtgttctgcatcaggtgggcaggcaggcgtgaggaagcagcttcgccaagatagtcaataacgataacatcaggagcacgaccagttgcctggatgtactcaaggatatcgcggcggaataaacctgtgtgtccagtaccagaaggatattccttgatgacgatatcacccttgggcgcaccatcttggcgactgcggagcttctctatcgttgcaatatactcgtgccttgtgagtttctctaaagactcaaagtcgcgacgcatgatacgggcatcaagacggtgtcgccagacgttctcggccacttcaagggtgaagacaaagacgttcagcccctgctccgagtaccctgcggtcaggtcaatcagcgttgtggtcttacctgcgttgatcgcgcctgttacgatgttcagtgtcttcttaccaacgccaccacgtgtcgccttattgaatatctcaactgcgaacgggatcttggcctcgttggagttcatgtggtcatactgctctgccgccatctcccaatagatgtgaccgaggtatgaatcaaaccggatagccagggcttcctgcaacatggtcgggatgttgttcatctcgtccttgcgcttctcgtcaccgtagatgttgacggcggtcttgattgcgttgtgtacggccttttgccgcgcccaagcctcggtttccttcgccagccactcttcattgaaggtgttgtcgttgatgttctccagggcagataccgcctggtcaaacacatattcgttcagtttcgtccgttcaagaattatagatagtgcttcgacagacgggcgggcattgtactctgaggtataactgtcaatcagaccaaagatgaccttttcgccttcgttgtcaaaataatcggctttcaggtacggcaggatctttctttggtaatcttcattgtaaatcaactgtgaaagcacgacagattcgagtaacattggccactaccccaccaaaaatttattatattcctgagcattacgctgcatgagttctacaaggatatcccctgacacctcagtgaacaagtcattttctttcaaattcacaaacatcagacgcaatggtttcttcaatatatcagtcacgaaagacaggcggggttcgccgtccacttcgttgatggccaccttgccgaaccggaattgaacaccacggaatttgccagaagtgatcttgatgatcgccagctgatcagcaccagggtcgatgattgtgtagttattgggggagtctcctccccctccactgttattcgcttgtgttaataacatggtccatttgctccagcatgttagcaggcataacagtaccgttagaaacaccgaacattttcttcacgtcatcggcgaagttgacattctccagcagcggataccagaaatcatcatccatctgacgcttttgatatttcttttccttctcaggatcgaaaccacccttggctgtacgcacataccaaccggaagacggcatatcaacataacccagagcacgagcgatctcaagcaggccgctccagcgatcaataccaccgttgtacagtaccgtcacagggagcttggctttctctttgacatggcgacctttcatgatgcttatgttgaagttccagcccagcagatctttgtcttccttcacctgagaacgggtgataaaccagatcaagttggaggataagaagccctgcttgccgcctttgatgttgggctcggcatactggttgccgatctcatcgtaataggagttgatccaaacacacacgagatttttgctgttgatttcgggagtcatgacacgccagaagctgttaagggcacgggcgcgggtcatgtcttgagtgtcgttccctttgatcgcatcttcaacttccttggtggagggaagttggctgatagagtcgatgaagattataacatggtcgcctttcttgacttcctgtaggatctgcagcaagcggatcttggtctgttcaacgttgtcgatcggtacgtacaggacgcggtccatgtcaatacccatagaggtccagtaatcggcgttggcacccttttctgagtccgcaaagacgcagatagcatcagggaacttgtccatgtacgccttgacgtccaccagaccgaacatcgttttgaaggtacgggaatcacccaccatcatcttgataccggagatcaggccgccgtcaatacgcccagaccatgcgatatcgatcaggggaataccagtagaacagatgatagacggttccagagcgtcggatttggacagaactgaagcctggtcatcgtgtttcttagcaaccttcagcatgcggtccattaatgaactggccatttcacttcctctttattgttgatcgtcgttaataattctacacccataaccttctgggacaaaatgttaaccgcctcttggatgctcttcagggacattgtctcaacaagtgacgatgcgtcattatgccggtcggttaggtacatattgcgcagattgttgtagttcgtgcggttgatgcacgcagtgttcagtgctatattcaggatatacatcatctgttcaatggttatatcctttggcatagcgtggatgtaatagatcgagccttcaaaatagacgtctaccagttcatctggtatcttggtgccaccaccggcatactcttcgatcatcctgaacagagactctggttgctcgctggcgatcttatgcgtaacagtcgccgaaagaccgtcgcccggtttaacaggcctgttgtattcagtaaggaatacattatgtccgccgccgatgatgtgctcggcgaatttggaggatgcctgagcagcgttctccgcatggtatgaaacgacgactgtaaacattagaactccagggtcagaggggtttctgcggacttatcgtaatccgcgccaccagcagcacgcaggcgattgcgatcgttcttgcgtttgtgtgccagtatgtaagtctcaatgtcgatctccatataagaacacgcagacgacaggaagaacatgagagtctcaacgcaagggtcgttcatgaattgcccaaggcggtacgtaacattgcgatgccctacaacacccaaagcagatggggtgaattcgcgattactaaggacttcaaattcttcttcgatctcacctttggtgcggtccacaaggatgaagcacagcatgaagtgtaccacgtccaccagttcataaactgcgttcgtatggtcaaacccgatgtcgttgccatagaccttccagtcacgggtggtttcatcaaggaactctgcccactcacgatagatagagttgatgactgcgttctgactccatacattcttccactcttctccaaagtaggccacgttagtggccttttggagttcgagcaggcttttgatatgccctgctgtgatcatttacgttctccgtagaatttaacgaacggtgcccaaccatcaaatggattgaggaattcgtagtccactttcatttggtcaatgaaagcctctatatcgtcctctatgataccagcacggtcggcctttgaaatacgggtgataggacatttcgtactcagcgcccattcatattcctgaggggtacgcagatcgctcacgatataatgaacgtgggggttctgctctaccagaggaagctggaagcgcttgaagaatgccaggaacagatcgggttgtacgtaacgcaagcccgtatcgctgcctagatgaagccagatctgccgtggagttaagcccttggggttatcagggtgcacgtaaggaacgtccttcacggcatcctctacctccgctggcagccatggatagatgtagttggctacacggcgcagttcatctgagaacgaaaggcgctggatgtccatatcaccctgtagttggtgatagctgatgagggactccaaacagaagtccttaccggagcgtttgcgccccgtaaagaattcaagatttgggtacatcatactacaccttccaggaacttaggatcaacgatcttgcggtcaaccggggaatgggtgagcgcggtgttcaagccatgatcctgaatcaggtctaggttaatgagcttttcgttcagtttgcagtgcagacagtacgccatctgtacaatcaggccacgatcagcatcatattccttcaggtgggcgaccacagtttcccacgggctgccgatatcacagtgatgaagcacaccagtgaacagattgcggatatggttctggttggtcacgttcgtgaagtgaatcatggagttgatgaacccagcttctactttggtatccttcgtgatctttcccagctgcttctggctgacttcattgttgtagtaatgaagattattagagaatagcttgtactgaccgacgtcaacgtccagcacccgagcaatcacttcctgaagaatagagaactcaatgaagttgattgaactcatcccccacagaacatcctgtgagcggttgatgaccgtcaggttcagacgaccttcaacgatggcgaacaacagagccaggttacacaccatgtccttggtcttcgcttcgccgctctcgctgaacttcgccagaccagcatccgaatctagagccgggtcatagatggtgaggtacgcctggcgagtgtttgggttcttacgcaggcggttgataacgctatccagctggtcatgggcgtacagacgcggaccataagcagctcgccatgttaccccatcatccgaaaagttagcagcgcgaggcaatacgcgtgacaggaactttatgtcgttgcggcctgacaacacccagaaggtctcgccgatggcagcgatagccgatgagttgcgaccttcaacggagagccagcggtcacgaatatcggaaacagtgatagtcacgccatcaaggaagcgggtgctatcagtattgatttcagcattaccaggatcagattcgatcccgaattcacggatagccaagacagcctgcttcagcatgtcattgttgttaattgctttgatttccatcagatactcccaaaatcacgacagaggaatgccatcacagcctggtctactgttaggccgtgagacttcatcatacccgcagccaccgtagggaacaagtctttatgtcgttgacgatggtcatgaactctctcccacttctcgaccaccagactttcattgaagtccacaccaccgttacgtgatttaacgcgggagatacacgtttcaaggggagtgtccataaagagcacaaccaattcacgtggtgggcgtgtcaggcgggggatccaagaactcaataatgtggatggaatgataccttcgaaaatcacatcatatttcaagtattctggttggtcagcaatagacaacgcgaacaacatctgctcagtgtccttcagggaatcaacccccttggacttcgacttgtcatatttaccgatacagaccacgttgaacgaaggacagacagtcagcatgaccttgccgttatgggtcacgacatacgcctgaggatccctctccgccagctgagacggcacagtggatttaccgctaccattggagcctttgacgtagtagatttgccctcgtgctggatagatcccctttacgacgggtggtttaaagaatgtgtggacggggcgcttcatcagccccttcagggagtaggacataaactgctccaataaacaaaaggagctgctattatagcaaccccttcatctattgaacagtttctgaacttaaatttacacagctttcgcttcagccagagcctgtggaagccattcattgatcgccttaaccagagactcagcatcagactctttgatcttctgacgtttggtaaaggacttaccgttcacgtacaggctgaagccccagccaccggaaacgataggcgcaacgtcgacatacgtattggtgcgggcgtgaaggttttcagggttagccagttcggtgaccgggaactggaaccaacgcatgtctgggttcacgtagctcaggaacacgccgggaacaacaccagcttcaatcgccgccaagaccggaccgtgattagaagcgcgagccaagtcaaccatttcctcacgtttggtgtgacggcgtttacgctctaccagcgccgcctgcggggtcagggtcttacccttcgatgcttctttcaacatagaagacgccaaggaaccgattttcgcgtcggacggctgattgccttcttccagcgccgcgttgactgcatcttcaaccgcgtctaccggggcgtcggacactggggcttcacatgcatcggcagagatcggtgcttcagcatcaatggtttcagcgactttcagggatacttcagcttgggcttgctcttgggcttgcgccagagcctgctgagtttcttccttctcttcggcgctcagaccttcaatcagttcgaagccgttggcagcctgaagaacaccttcaaccatacggcgtagggtaacgtttccgatgatcagacctgcttctttgatttcagcctgaatagcagcaacgtctttgccttcaatttcaattttggttccagattccacatgaagaatatatgacataataaaaaccctttcgttattaagaccgtatccgcggcatattgttgttctgactgtgtagtgagaacataatatactgcattttcatagatgtaaactactttttattgaaaagaaagttaacaccttagtgttataaggtgcgcgaccaagcggagcgcgaacttgcgtgaatattaactttctacgtcaatatagaaaaccatttccggcggccaacaatttgttagctcgacttttgcgaaccgtggttggcagtacgcatcaaccgactcatcaaacagacagtgttctacatttgcaatcatcagatcatcatccaccacttcaacagaatggacaatgatcttgtggtcatacgtcaggcaaccgtctaaatgcatgttgtcagcgcggaggtgttgcatgatgaaatactctatgatcgactcaaggacagtcgtcagcttcagataacgtttcatacacacctctcacagtggagttatttggacaagtagaagtttggaacttcagggaaatactctggtggatattcccctagaacatcctgtttcaccttcccttcgatatcttcgcggatacgacgaatcacttcttcctgttgttctgctgccatcacttcttccatggctgagtacaagttttctagaataacacctacgtagttgtggatggcacgacaggagttctgatcatactccatatccggatgaatcgccaggtcgacctgatcacgccctaccagcagatgcccagacaccagatttatcgggtatttgaatacttcactagatttgacagcaactccgtcggcttgcttcagcaggaattcggtttcagagaagcgttcaagcagttccgatgggaataccatatcgagattctgacgcttgcgaccaaagaagtatagacaatgcgccagtttcaggcatgcatcggtggccatcttcatgtgtgctttagcgtgttcataaccagcgatcacatcacggacataatcgtacaggtcggaatgaccaaaacggatgtcctcttcgaagcggattgctgtttcactgtccggtttcacacccagaacatcgaaaatattttgttcacgaacggatctgccgtttcgatcgaaacccagaacacaaccgacttcgaatccactcttttcaaaatttgggagtttcatatcaaggcgagctggggtgaactctaacccgaacatacgataaatttgtgacatgttatagcctcatcatttaggattacctgttcacgaattatccctcggaacgggttatagaactatttcttcttatgcatacgacgtgcatctttccacacagacatctggctctgtttctggaagcgggcagtgcgcatgaagagaacgatctcccagtactgtggctcaatctcgtaaagctgtgaacggaactgatcggcacggtacagcttcacacagtgattgtacagcggatggttggcgaagcgcttcagggcttcccaggtgagcttcagacgcgtctttgagcggtatgcccgttcgttacgcaacttgatcagatcctcaaacaccaacagcctgagcttcggtggcaggtagtgcatgttgagcccccagaggtatgtcacacccttctctccaaaggtgataccatcacccttgacaaagttgaagaaaaacaccagagggtacatatcccagtagggtagttcattcttcgtcagagcatcatatttgaaatagaacatacgcccgactatataccgcacaccttgtaccggacgtttgtgatcagcaaacgcctgtttcatatggttgggactcaggttggcgtccttagacacacgctccatgaaccacacatgcgaacggcggatgttacgcttcgcctctggaccgaagtgttgacggtacttgcggatgtaacgcttgaccagctcgggggcgtccatctcggccggaaacagcaacggatcttcttcgccagctgcattctttgccatttgtcaactcctataaataataacagttattttatttaagtggagtcctcaccgtggaagactatcgcaattttatcacacagatgttacagcggggcttgtcgcgcaagaaccgcttcagagtgaccatccctctaccaccagggatctttgactccaatgccactctggctaatgacggaaaggcgtacagaaccaattcatcttttggtgacttgtttaagcagtcagcccgtattgtaaacgctttctttggagggacaaaccagacgtcccgttcccttcagatgatgtgtatggttgcctcattgccaggggttggtatcgacaccactccaatgacaagcaacggtaatcacatcaagatgccgaacaacaagtccaacgtcgacctcgacttgtcattcttattagccaatgactattatgagaagtctgtgatggacaagtggaagagtctgatctttgatccacacaccaccaaaatgggatattacgaagacttcgtgactgacatatgcattgaacagcttgacaccgaagatcaagtggtccaccgcgtctacatcgtcgaggctcacccaataaatttcagttctattgagctagataaaggtgccacagaccagttcaaccagtacaacatttctttctcttacaacaaagtgctttcggagacagaatatgaaacacgcagcctttccagcgattttcttcctctcggcattgctgacgctcttaccagtggtgactgggaaactgcggcctcaaaagctggacagctttatcgcaaggtgaaagaagggaacttcacaggagaggctctcctggcttacaaacagcttgaccaacttgtaaacaacctggctgggataagcatacaggacttcgagcgcatctcggtaggtatctctcgtgacatcatgggtaacgataacctgacggcggcggagaagacaagcctgttgggaatattgcaagacgtgatgggaaaataaaaagccatccgaagatggcttgttgatcagttagacttgagatactgctcgaagtcgtcaatggaagccgtgtttctggcatttggttgagactgagtctgagcctgcgacggcgcggcctgttgctgtttcaggctgtcttgagcagttggctgatgtgtagtctgggtgctaggagcatgagccatcgtggctgcaccaccttcaaccagaggctggtcatcagggattgccagaactttgcgcaggcgcttttccagggagtcgtagtctttgaagttagccggattgaagaattcaaacaggctgtgctcgcgagaccagacgtcttccatatacgcttcgtcatcactcagcggggcagggttctcccacaccaccttactgaagtttgccaccagaccttcccagttcccaaacttcttctgctcgccaaagagcttcaggttcaggttggcaccttcccacagatcgaacggatcgaatttagggtcggttgggaacttaggattctgcgcctgatccaggattttcttgatggcgttaccaaattccagcaggaagaccttgccgttgttttccggtacgttgacatctttgatcaccaggatgttagcgtagtatttggtgtcgggtagacgtttcttcaggatgtccttcagcttttcgtcgttcgtttctttctgctgcgcccacagcgggcggtcatggtcgcgcaccggatcgtcgttgccgaacgtctgaggtgagttctcaatgtaccaaccaccaggtccctggaactgatgcttcatgatcatggcacaaggggtgaggatctgatctttatcgatcgttccttcttcctgtgctttgaggtctaccagcgggactggcaggaagcggatgatgttctcggagataccatctttgttccaagtccatttccagatgcgaggatccttctggaaaccggacttctggccttgctgtgcaagacgcgcctgcatagcttcagtttgctgaccacgggacgctttcagacgatcgaataaattacccatttcttaatttcctctgtttccgcccctcagggctattctgttacatgtattttcagtttgctacaaagcggggtaattataccccgatcttacattgaattaacctttaagcacttgatttgctgggtcaatttcaataatgtcgaacacgtccgaaaacgtcttcttgccttcgtcgtgcgtgtgatactcaacgacatatgagcgaccatcaggggtaacgtaacgaatacgatccgtctggtcggcattctcgttcagactacccacacgccagcgcattgcgccaggaagaaactcggcagctttcattgcgctgtaaattgattctttgctcataatagacctacactaatttcttggactttagcgcgtctttgatcaggcgcgcatcggagcactcagctgtcagtcgtgacaacaatggtgctgtaatcatctttttgactttggtctcgtctatgtcgttctcttcacagacagctgccagagtctcaaggatactatccttggtttgggcggcgcgtagtaggacgatttcagaaaataattctggtgtcatcacaagcgctggctgtttttcgtcagacatcgattgtgttccccttacccgaacccttctttatcgtacgcaagacgtccttgaagccgtctggagctgattgtggtcccttcaccccagagacaatcttgggagcacccacgatcattttaatctcccctccgcactcagtgcaggggttggattcaggctcatggcgatctgcaatagatttacgcagtgtcatcgcgttaccacagcccttgcattgataatcatacagcggcatggaacacccccacagttgtcagtacgaaacgtaccataatgataaccagcaacatcactgtagaaaacattacacgcttgatcattttatcgcgcatgtggatgaactgatatgagaggatagcctcggcctgttgatcggcacgaacgttcgtgtcacgatgtggggacagtgtgtagaagttgatctggtacacatacgcatgaaccagagtgaagaacgacttcacccagaccaagacaaccactaacaacaaagcgaacgtcaggaagttcgccaacaaccaataatcgaccatcatatacctctgttgaagtctggattattctcaatgaagtaagaaccacaagccattatcgcaaacgaatccacgaggtcatcgattggcttaggatccttaacttccaacatatccattataccgcgcatgctaacattgaacagtgactcgaagtgagcgatcatggcgtgtttatccgcgttgcccttgtcggtgaacatcttcttcacatgggatggcgtcacgatctggaagtcgaaattgttacggcgcagggcttgcttcaatagtgaggtattctctgcggtctggcatatgttgttggagttcttagagttgcccatagcatacccttcaagagtgatcgcatccggcttctcggtcaacaggacagcctcagtccatttacagatgttatagaagcgttcttctggggtctcccacttcggttgcttcatgataaggatgttctgacgaatctgagtacagtacttctccacagtataatatgcgtagaagcgcagatgatcaaaatcaagagggtctttatcatcccagaagcacagggatggacagccataggagtagtcgattccgcaatatttcatgtaaatagcccataacaaagtttcattggtgtatgggctatttacgccgggttaacgagtgatgattttgctgtcaggcaggatcagaccagggtggtccaggttcttctgcatctgttggatactctgcaggatcacggtagtgtcgatgtggcgtttcactttgcgcgcttcatcaccgtaggagatctgtccctgaggatcgatgtagtgggctgtcacaacctgcagatcataaccacacttgatcaggtacttagcaatgttgctaacttcgagagacagggactcaccgtccacaccgatgttggctgagtagacgattacgccattttctactgctttcggttcaaacaaaaccataccagcgatcgtctggatcaaaggaactccctcggtatcgaaagccacctgatcgaacgcaccgatgaactcatccggcactttaccttcggcatcagaaactgtgtgtttcataaggtccaggacgtgttgttgtacttcctcaatcggagcacgttcaacgggtttttcgttttgcattacttttctccagttcataatcgcgctccacaacgtattggtagacacgcatcttaatatagtcagcactgcctgctgaagacagcaccatccatccactactaagggcattcatcttatattgaccaacaccctcttgaaaataacttttaatctgttccagctttcgcccacgatgataatacgagatgagttcaccaatgacaatacaatctggataatgcttttccaatgtattgatgttgcggtgaacatacacgggtagaacttcttcatcgtcgatagggctgtagtatgggtctacgatgaccacttgtagaccataacgcagcaggtctttgacacccagccgacagaacttataatcttcgtgtttcattgccacatggaggatattctctttcttggcataatcggtcaggaagataaagaagtctgtgttgggatcgggatattgtatagacagttctttgcctatttcactaaaacaaaatccgcgcattttcattcctcgttataattactcttacaatataccgtggagatacattatgaatttaccatcattgcccagaacagaaaagacatataaaagcgacttttggcctactgtgatcaaatatcgcgcctttactgcggggcaacaaactttgttacttcaggtgtcagatccgcaaacaccgattgaagaacgcgcagccatgatggagagtctctttagcgaatgtgtaaatgcaggtgcacctttcagtaaactgccaatcggcgttgttgaggaagtgttcatccgcatgcgcatgatctccatcggtgaattgatgaagattcgctataagtgcaataatcagattgaagaaacgatcgatctgggagatggtcaagaaaagcaccagatggttccctgtgagcaggaactgactctacctatcccgttgaacaacgtcaaatgcattgctcaggacggcttccgggagacgtttgacctgccaggtggatatcacctcaagatgcgccaaccttccttctcggacgctacggcactgtctgatgctgcaagcgttgagatgatgctggccacctttatcgactgtctgtacgatgatgacggtcaggtgtggaaggttgagaatcctgaagaaatcggaatcactccggaagaggctactgagcgccgccgtgtgaaagaagcgtttgttgagtgggtgaaggataacatcgaatcagatgttattgacagcattacgaagaacttcttccataaaataccgcgcatccactacaagagttcgatcaagtgtccgaaatgtggtaaggagcacaaaatcgaattcaatagcattaatgaaattttcatttaatgtttgaaactgatttattatcctacttcgtgatgtgtgatgaattgaagttacacggctatagcatatttgaaatcaacgagtcgatgccatggcatcttgacttgttaaccgaagccctcaaggtcaggttgtctaagaaacagtaatcccgcttcggcgggatttttattggcttaactgtaaaatcggttaacacgaactttctttacctgaaattgctataatgggcttgttcccgagtcatttgttggtgtttgtctgttttgaatcagattgtcagtaaaataccatttttcaaggagtgttctggggtgtacagttattgcctcgcccttatgcctccatggcattggaatggtgctgcccgcatagggcggtttgatgagcgaagcgaataggatcgaataaaacaaataaaatgaacggaagcagagcttcctatagtatataaggcaaaatcagctgcgcataaataccttcaaatccttgtttgacaaccggaattcaatatgttagacaatatgagatggttttacggcaccgttgaagatgtcaacgatccagaccaaaatgggcgagttgctgttcgcatatatggcgtacacaccgacgatcccgtcctcctgcctacggacaaactcccatgggcgaaggtactgatgcctgcttcaaatgcctcctctgctggtttaggttggtctccaacgggtatcattcctggtactgaggttatggggttcgcccttgacgaagcataccagaatttacgcatcacctggacttggactggttcaagccctactgatggtgccgacacaaacccactggctctcgggcaggtcgttcaatctgtggaacgtcaggcgtacaacgccgtcactgacgttcctgtgaaacaagaagacgaaccacaaccagatccacaaccacctgttggcgggtatgatccagagaagtggatgacaatcgctcgtggcgaattaggtatcaaggagtatgccggaaagttcaacaacaacccgcgcattatagaatatcacaagacaacctcccttggtgcttctgaagatgaagtgtcgtggtgtgcggcgttcgtgggttgggttatgatacaggctggatacacgtctacacgctccgctcttgcccgatcttaccttacatggggcactccactgtcagcaccacaatatggcgctatcgtagtcttccggcgtggtaacaaccctacatttggacacgtagcgtttgtgcagaagttcgatgcaaactatgtctggtgtattggtggcaaccaatccgattcagtgaaggttagtcgtttcagacgttcttcggtcttgggatatcgttggcctggtcctgctaacacagccacagccgcgcctgcgcagcagaatggtaaatggtcagaacctatcccagatcgtactccaaaggaacaaccgactccggctcctactgggcgagtacaggatattgacaacactggagaaaccatggttccggctgcgggtggctccaaatacccgtacaataacgtcatggtgtcccgagctgggcatattatggaagtggatgacacccctggtggtgaacgtcttcattggatgcataagtctgggtcttacaagcaaatgttgccggatggtgatgtggtcaacaagtccgtcaaagaccactatgacctgacgatgttcaacaagcgttattatgtcggcggggaccacaacctgacggtcaaaggaactgaagtccagcgcaagacaggtgaggtctatcatttgcattccaacaattactccaacgtggttgcgggcacagcgctgatgaaattcagtgatctagccgagatgcaagcacagaatattctgcgcattatctgcgagactctggaggtcggcgggacattgaaggttcctaagattctaacgactgagataatcgctgacaaactgactgtcgctcagacgatcaatggtaacatcatatatgccgaaggtgctggtcgcgcttcttctctgtcaggtgcaacccctgcatcccctacgggtccgggtgagattgacatcaaggcagaattaaaagacaatggtggtaatttcggcaccaaagagtaagttggtataagtttagtggcagaggggcagcacgtctctctgctccttataggcatcctgagaggatcgcgaaatgaaagagtataaagatgtcgatctgaagttcggcatgcatccggtgaccaaagacgtcaccatgaaatcaggtgtgtatgctgtcttacaatccgtgcggaatatcgtcatgtcttcagttggggactggcccacttatcctgggatcggcgcggggctttatgggctgctgggtgaaaacacgacaccgactatccaggtagatgtgaagaacaaagtagaggacgctatcgccctgtatgaacccagagcagaggtagaagaagtcacggtgagtctgtcagaggattaccattctctgggcgtgaccatcacattctatgtggtcaacaatccagatccaataacagacaccgtgtggttgaaaaggacgaattagaatttcgtcctgaatgccggagccacgactaacatgaagtggctcaataacctgaacatctctttaccgttgaattggtagaggataatcatcggcctgacgtcaaccactgatccctccagcttcttattcaacataaatctggaacccacactgacctttccgcgctcttcgtctcctggtttgtcgtagaccacgcaactggtggcataaccgatctgagatccatcctcagaccgcaagggcagcatatgcccttcagacatcagatgatgcaggttctggtataaacctttgtctggtatggggactgccagctgcattctcaactctttgtaatcttgcatgaggactactccgccagggtgatcacaaccatatttaagactgtgtcgatagctcggcctgtttcctcttcatggagggtttcggcgcggaggtgcacgtcggtgatgaaattgtcgatgtgcattgaagtcagatacgggcggtgttgactgaccgggcggttgaccagaacataattgcgcaatgtgttgaagtcctgatgagagcaccccgttgtatcgatacgaaggaagcgttcgttgtggcttgtcttcaactcagtcaccttgccgaggtagaccagaggtccattgcgaccgatacggaacatgacatcaacaacagacttgaagatttcgcgttcaatcagtgcggtgggtgaccagcagatctcttctttgtcgtcggcgtacagggtgtcgatcaccagagggagttgaatgtaaccgaagttgtgcagtgggttggtgagtactttgtttgtcatgatatagttcccgctttcaatttgtggcgaatgccaatgaattactgggaagtatagtggagggtgtttcaaaagtaaagcccctcattgaggggctttggcttgtcagcgtttaaggctggcggcgagtccattaacgtcggtcacggtctggtcagcgaggacgattacaggcatcgacacgcgcggcttacccgtcaactgctgaagttcttccagccggtaatctttgtccagcttgaggatcttgtgctccagccctttcattttgcacagattttcggctgttacacactgagcgcaaccttgtttggaatagatcgtaatcatttctcacctttaagcgaatttgaggccatcggataccgaaccagtcagtacacccatcagataatcaggagcttccgcttcctgcaacgcgtactgcattgccttattatctagccagtcattaatccatgggactgggttctccttgcgaggttcaccgggatatgggtgcccgatagcgcccatccggtgggttgccagccagtctaccatctgatgaaggatcttggcgttcagccccaggatggaaccgtctttgaataggtagttcgcccactccttctcctgatagaccacgtccaggaacatctgggtcatctcaccacgcagttcctcacggatgattgcaaagtcggggtccataccaggcaggcggtttagcagcgtctgggtcaggatcaggtgatcctgctcatcacgggcgatctgtcgaatgattttggcattgccttccatcttcttctggaactgtgtgaatgcccaagagcatgcaaaggacacgtagaagcggatgccttccagtgtgttggcagcaaacagagcacgccagaatgcgcgtttggcattcatcagatcttctcgggtgaagatgcgtccggtcatacgcatgccactgtactgtaccatgtcatcgtagtacatactgatctggtgagcgcagtccacgatctctccaacatccagtacgtggtcaaacacgatacctggatcgttcacagtgttgcgcaaaatgtgggtgtatgataaagagtgaatggcttcctggcgcgtccattcaaggacagcaaactgcatttcaggggtagacgcccatggaccaaacgcctcgaatggtgccgcaccctggatagagtccagcatggtctggcgcttcaggttgctgaagtagacatgtttctctgcttcgttcagagtagcgaagtctgccttgtccttggtgatgtccacctcttcaggacgccagaactggctgagacctttctcataccacttctgtacgaatggccaggccacgacatcgtaacgctggatgctcactgggtcaccgaagaacggtagaccagtgttgtccgagcttgggtcgaatacggagaattgtttctgttcgctcatgtttctttcctgattaataaggggtgatctctcacccctgatgatataacggtagtaggtttagaccaatttatacaacacagctgtcgcactgagtttcctcagcctgcttcagctcttcgtcttccttggcgtccttgtttgtgttgtaatacagggtcttgccaccccacatatagaacgacaggatatcctgcatcatcttggcgcgagggatcttgctgtcagggtacttctctggatcataccacgtgttggtactgatggactggtcaacccagcgctggatgacagcagcggtcttcaggtactcaatacagtccaggtcccacttgaggtcatacatcggtccaagggtctcaacgtccgggacgacctgcttataagtaccgtccttgctacccttgatgctcaccaagcccttcggtggctcaatgccgttcgttgcgttgaggacctgtgaggagctttcggtaggggctactgccagcagggtggcgttgcggataccatatgtcttcagattatccttcaacccatcccaatccagcccgtatgccatcccttctggcttcttaccatttggtaggatatcaagtggaagcggctgaaggtcggcggtgacctgcccattattgtggatggttctgcgtttacacgccccgaacttcatagccagacggttggatgccttgaccagatagaagtgcaggtgtgccatccacgcatccagcatttcaagaccagctggtgagccatagcccgtgaagttcttggccaagaagtgagccacattcacgataccaacacccagaggacgatagtcttcaacagccttgcgagcctgaatcgctggatagtcctgatattccaacagcatgtccagcgcagacaccaacacgaacgccacgtcttccatttcggtcgggtcttcgaatgctgtcaggttgaaggaagccagggtgcacagagccacgcgcccgttttcatcgttgtactgctcaaactcacgggtcggcagggcgatttctaaacaaagatttgaagaataaatcgtgtctaggttgaatggactgtattcattcatgtgatcgacaaatgcgatgtagatgcggcctgtgtctgaacgctggtctaacagcatctggaacacctcttctgcctgcaacttcttagcacgaaccaaaccggcatcggcggccttgatcatgttctcatacagagtacggaacttgtcaacgtcagcgaagtatgcttcatacatttcgcggttgtctttcgggtcgaacagatacagaggctgcttggcaacaaggcgctcaaacatcacgcggttgatctgaatgccatagtcgatacggcgttcgcggttttcttcagtaccacggttgttcttcagaacaacgacgtcatcgaactggtaatgccacagagggatgtacgctgttgctgcaccaccacgaatgccgccctgagagcacgatttgagtgccccagtgagatacttgatgaacggaatcaggcctgtgtgaaccatctctccgccgcgaataggactaccaatcccacggattgccccgacatcgaagccgatacccgcacgtttggagacatagtcaacgatggtcttggctgttgcgttgatagagttcagggtgtcatcagtcttgattaaaacacaggaactgaactgacgagtaggagtacgaacacctgccataatcggggtgggaagactgaacttgcctgtgctggcatattcatagaactttttcaccatctccaggcggctatctttgtcccagttagagaacaacgccatggcgatgcccatgtacatgacctgaggggtttcgtagaagatcttgctgtctttcttggaacggtcgcgcaacaggtacttctcagtcagctgacccatggccgcccacgtgaagttcttatcgcgtttgtgattgatgacatcgttcagctcgttgaactcttcggtcgtgtagagatcaaggaactcacgatcatacacgcgctgtttgatgttcttgacgaagatgtcaagcaggtgaggcggcttgtactgaccgtagacagccttgcgcagatcatacgacttcagacgagcagccacatactggtaattgggtttgtctacagagatcagtgaagccgcagcctggatgaggatatcctgaatgcgatctgttctcatgttgtcggtgaactgaatcttagatgcagcgatcacctctgacattgacacaccagacaggccatcacatgcgcggtctacgactgcgtgtagtttctcaatatcaaatgggacagaagatccgtcacgttttataacgttaatcatggtgttcctcgggtttgtttacgcaggtttattatacgccgccctcgtagattgaaggcggcggggagggttggtgagttacttaaatgtcgtacagatcgttgacttccagcatcaggcgggtgaagtcgccgcgcccgttgcggtcagacttgtcgaactcgatgatactgaacggctgaacccattcagggtactcatcaccgacgccaacaccatcgatcttcagggttccggcctccagcttggcgttgaagtcgcggaaggaactgacgtacttttcaagggcgctgtcgcgcaggcgcttgttggactgtttgatgtcaccgttgacaaagatgtaagtcgagtcggatgcgcgggtcagtaggttcttcagctgctccatatcacattcctgcgcttcttcaatgatcaggaaggtgtcgtcgaaggtcatccccttgatggtctccagatcctggatctcaatgatccgcttctcccacagatagttgaagaaaccgtcgctacctgtgtcagtcttcagcaccttcttcagcgtctggatcaggggcatcagatatggcatcaacttttcgtatgtgtcgccagggcggaagcctgcagtctggcctgttggcaacggagaacgcgtgatgacgatcttgctgaccactttatcgatcaggagcttggcggcggctgaggcaccacagtacgatttacctgtgcctgccggaccgattgcgatggtgaggttttcttcaagagcagattgataagcgaggttctgattttctgagaggccattgaacggagcgattctgaagtcacctttagagaacttcatccagtcatcttctttctggattgtctccttcttacgtgctgacttggtcttgcccgctggcttcttacttacaactttggtggcagattgcatgggaaccttcctatatctcagggtgtcatcacctctaattaaggtgacaaccccagcatacctgaggattggataaagaaaaggccgtttccggcctttgagttaactgaaactcttgtatgctgctgcgagcttcgtgtcgtactggttcttggcatacgccggaccattatagcgccgcgcaaattcagaccagttcttgtccttcagagcctgccagagcttggcgtcagccttgatgaacttcacgaatgccatcaaatgagcacgttctcctgtcagaaagtcgttgaacatctccttggcgttggcatatccacagacctggcagttgaatcccatgatctggaagagaccgtaagaggcgctctcgtacgcacaatcctcatcgatgttgatggccgcatgaagtcgatccaactccgcgtcgccgcccgtgtacccgcctgcggaagggttgaccaacgtcgggtacatatgtcccatggcattcgcccgagcctgtccgaacttcgccatcagcttcttatacatgatgtggcgctcaaataatgtcttgatcttacctgacttggtgaagcccgtgccgcgcgactcaacctgattcaccgccttgacagaggcaaggtcaacacccagatcgttagcagcatcaatcaggtctgactcagttagatgatcctgatgggcgtctccggcgttgcgaatagcataggaggtctttggacccacgataccatcaatgacaagccccgcacccgcctgaacagtcttgacggcgttctctgttgccttgccaaagataccatcagcgacgagggtgaagccgattttgttgaggctatcctggagtgccttcacttcagtgccacggttgccaagttttagaatggccataagaaaatacctccacaatgaatgcagaggtatttaaagtgaaagtgaactacttgagggagtggtgtactacatttctttgagcagcgttgccataaattccaccttctggcgcaaactgatatacgcttccggagccgatttgccacgcccttctaatgaatcccacccgatgattttcgccgaccaaagtttctcatactgatggtaggtcatcaaaaacgacttacgacacattttgatgtctgcgccttctatgtttctgagtatttcccagtccacctggcccaaagaaattttgagttcatacagagccaatcttgacaattccaagttattctttggagtgccttctggtttacctggctctgttatggccaaagcctcttgttttgttagtttcatcttgctatcaccactggcataacttcgctgaaggacgtacgaacttcggcgtcgtacccgtatttttccaggactaccaacatcgcctgctcgagttcctcttggaactgagggaagactttgttcggaatgcggtcggcaacccagagagcgcctgctgaggcttggatgactgcgcggggcatggtaatctcctaccaaaaatctgaatgggaggggagttgcctcccctatgttacacgtatggattaggccagtttgctcaccagagcttcaactgcgtcggcgctcagtttacccattttgacgtactgagcttttgcttcgccgccaacagctttcacgatgtcagtgttgtcatacccctttttagggaagaccatcacagagaatgaaccgttgttcagcgggttcagctggatgcgacctttaccgactacgatggtgccgtaagtttcggtgcttgcttcgacaatgtggatgtcgtgacccaggtttttcagcataccaactttgtcggcagtcttagcaaccacagctttgtcaaccacaacctgctctaccagggtgaagccgttagtcgatttcactttaccgttcagcaggttcatgaaggaagttttgccaccagtgaagccagccgcctgagcgatgcggaacatttcaactttagcaacttcggtgttcagttcgaaagagatggtgccgttggtgatcagagttttggtagtagccatgatgtaattcctcataatgtagttggttcatttcacttttcattcggcggtgtgttgtcgccctatgtgaactataatagtgcatcattattgaagagtaaagtctttttcaataattttttaaaatatttttgaagtattttaaaaggcctcattcgacgaggcctggagggaggtgatgtgaagtaaaaagttttagctcgggcgaaatcttacaaactcgcgagccaattcggcctgttcagcactgattggttccccatggaagtccacctgaccattcttccagccgtggatgaaactcggggactcttccccagataggacatacccctcacgagatttcaagtacccccgcacgatctctccgtcgtccagtttgttcagttcttctaacgtcatcgcactttcctcagttcagcgaattgtaatgatgcggccataccttggtaaacgttcttgccgatcagcttcaggaggtcttgtatggacatgttgccctttgatggcatgaccatgtcgttgatatccttccaaggaacgtctggtgggaacagtacaaccttgacacctttatctatcatcttctgaataccgtcacacacctgcgggttccggtactgattatcagggatataaatgtcacccttcacgctcagtagatcagcgtcggccgatgcaagacagttgggtaggaacaggctgtcaattggaccttccacaaccagcttagtcttgtgaatgttcacccggtcttcaccatacaccttagtgtcttcatccttgggcttgactgttgcgtagcgcagtgtcgcattcttgtcgaatgcacgcccctgaacgatcttcatgcgaccatcctgagtccagaatgggattaccaggcgctcgtcatcgggaattttcagctgcttctcagggttcgtttcgaactggagtagatcctggcggaagtgctgtgtgtaatacaggagggacaaagtgctctccggcagtccacgccactgtacgtactgtcgagccttatggtcaggcggtagtagatcaagccgtagcatattgccgaggaggctctcgtcgcgtttcgccgccactgagccaatacgggcggtctgtgtcagctttggcaacggcttcagggaaggaagtggtctacccgacgtatcacccagcagacggaacttctccatgttgtactctgttgagaggcgctcatcgaacttcttcagccagaactcaaatgaccagccattcatctggttgcagttgtggcacttgaaccggaagcagtcatgatcccgatcatagaagaagtatccacggcgcttgttagcagacttcgtggagtcaccacacagagggcaacggaagttcgcaacagaacccacgcgctcccacttgaacttgtcaaggcggggcgacacgttgttgataaattgctcgtcaagaaatttcatttacccacccggtacggaaaaggatagatttatactcttccaccatgtcctggtcgtaatcagtttgacgggaatacgattgggcttcagcacaatcagcgccaagttccacagaagccatagcggcttgcatgttcaattgatttttgtactcagaaaccatcccatgtctttccaaatattcacttgcctggataaatcgtttttctctggcgaacattagaccatagttgatttctgaaaactctctgttgtatgcttttaatgacataatgacctcttaaatcgctggcctctggaacacttcggtcacagtatagtctacaccacgactttgagctatacacagttgtcgccaagccccatacaggatattctgctccccggcagtgttgcgctcaaagtgggcgaagccgtcgaggagttccatgtagctgcgcatatgccgggtaacggttcttcctctcttgatctgttcatcaaggtacttctgataatgctctggtgatgataatgaagagtacttcatgtctggcacatgaactggcatcagggacttgcggggtgtgaagtagaacagcccccactttggtggcaggtcttcaaccctgatcacgtcctgagggcagacataaaagcggtatgcacccatgctcgtcgtcggatccatgcgatgaggcttcttcttgtcggtaaggaaatcagagcgagacaccttcacttccatcaggatagagcaaccgccggaacggaacccgatggcatcaggtgattctttgttgtcaaacgaatttggctcgatgaagacagcgccgcagttcatgcgaccgcgcaggtagttggccgcgatttcacatccttcgcggtgtgacgggataaagattttgctcattgtcctttcctttcggtgaataatgagcaaaattatatgcctttatttcgtattgacttacgacagctgcttcagtttgtagatcgtctgatagcacagtgtcttgatatcgtcaagagtgctctgaaggtgggagtcacactgcttgtagatgccatcgacgtctatcaccacactgttaatataggagatagggtctgggttgtacaatttgatattctcgaatgatggaacatactgaccacccgcaccgatgtatgcttcggtaaacgtgtccagcaagccctccagttccccgtagaactccccgagtgccttgtgcttggcataggacgttgtaacgaagtgtaaggcatgagagtgggctatagcaagcagtccacggttgatgaaaatactcgcgttgaccatgatgttgtcctcagaaaaagaaatccccctgtatttaagggggatccagttacagaccaagttctttcgccgtggcgtcgtctagtgcaaccttctagacaggcttaacaccgaggaacttggcaatgtcagcagccaggtttttacccttgctgatatcatgctccttgccgttgcaggtgacgatcacatacgggtcatcttcaccaccgaagttcacggtgatcgccttgccgatgccagggatgccagagtattcgaactcagtacgaccactcttgcgagacttgccagcacccagtgctttgccgatcatcttgtccatgttcgccagttcctgagcataggattcagtcacctggcctttgtcggcagacttgccaaagaagaattcgaaaccgtcatggacagcaacgacttcctgaccttgggagataccgtgagtctggtctggggtcagcttcaccttgatggtgttgccgttggttaactccaggttgtagacatccgcctgattgtcaggagtgatctgggtcacggtagcgccggaacaccactgggtgccgtcagcttgcttggtgatggatacggtcttaccctggacaccagcatgggtctgaggtttagcggcttgttctttaaaatattcgataaacggtttcatcttaatctcctcggggatttaagttatttataagcccccgaaggggcttttgatgatcagatcttaatctgcatgttgccacccagggactgctcgtactcgctgtatgcgctttccccgttgtcttgtgaccactggtcagactgctgggcgctagccagagtcatcaggtttggttcagtcgggttgtaacccttggacttcgcatcctggtacagagtctgcaggtactggttggcgcggtcaatctgagctttgaactcgcgatatgccccttcagttgtgttgcggcggaaggtgatatcccagtccacgttcagagtctgaccatcacggcttgcatagatctgccaatccaggtcgcgaccttttggtgcgttgtcgcggatggagtcggcgtatgccgcaaggtcggcaccagtcttcttcgcagtactcgactctttctccagtctctcggtttctttggacaggatacccaacataaattcattagtgcggtgatccgccatgtcgtacccgcgccaaaggactgaaccgttgttgtcaacagaaatgtcgtccaaaaatacttgtttcggattatacgacgtgcttttcagagtttgcgtattccgagatatcatttccatattagaagaaatttcatcgatcacggcctgaacaatatctttcttcaaaggaagttcatatgttttcggattgttcaggatacgacctttattggataccataggcgtgatcgccactttgcctttgtcgtagtaataggtcacattcgtagtcaatacagcaccatcatacttcccagttttcgggaaattgacgccagaccaagtgatggacataccgttgacagtctcaccaaacaccatggcgttgcgtggcatcttcagggttccagagttgaccagatcatcgccttgggcattcaggtcgatagaaccatagatggtcccggtgatacgatctttcagcatcagggtcttgtcgcctttctctgggatgatttccagtgggtgcttgccacgcggaggctctttgatgagttccagcagagcagtgttcccaggcttcacacgattcaggacagcttcggacactgtcagagtccagtttgcggtttccacataaccccagccccgagaacggcgaatggctttgataggatatggagcgcttgttggcactgcgctaatttcccatttgccagtgtactgggtcttggcaacctcaaagatggacgcaattaccgcattggcgacgtcacgggcgctacctttggccacgttctcctcttcagcaatttcgctgaaaactgagtattgaacgaaaccagcgaggacgtttgtgaagttgacaacgataaccaacccgcctgccgtcgtgtaacgaccagcgcccacacgacggatgttctcaccaggaagaatagaagtgtccagcccaacgttggtatcaatgatacccagaacacgagcgatgaaaccgctgtcacgtaattgatcaacactggttgcaccctcggtcgaatccgatgcggatttagacactttgttcaacttgatagagacaagggtttccccgttgacaccgatgatatcccattcagtaccctgctcgttcgagatgcgggcaatcttgcgctttgaattgatggcaccttcgtaacgcccgtttttgaccacaacagaggcagtggcagcatcagtcgcacttgctgcatttgaaaagtctgggtcggaaatactgatgtcgacgtcaccgttttgagaacgcatgcgaacaccgtttttgaatcgttccacgtttacttctcgagcaccaagtcgtttggcatcaataacagcagttccagaaccgataatgttggctgggttatttctgtctgaactgttttgagaacctttccaaaattttgtggacgccgtggtgaaatcattcaggatactgatagggacttgcggtaatttcaactgacgagcaatgaaatcagcactttgcccacgcacaggtttctcattcatgtatgcgccaacatacacgcccggctcattgtagtggggagcgatatttgccgtgttcatgcggcctctctccttaccagcccataacaacatgggctgatccccgtttgaagttaatttccatccgttggaattatcaacagaagatgacacacccacatccggagtattgttctgaaccggaacgtcaccgaccttgtctgggtcgtcccaggtgataccctgcatcttcggaccgtcaaatacctgcgccggatctttacccttgcggaccagccacacataaccacggtcggggacaggcgcgtaggtcaggtccatgacattcagtttctgtttcaggccggactggcggatgatcttaggaatcagggacataccgcgatccagcgctttcttagagaagttgacagcaaagccatcgatggtcttacccagaggagtcgccatgaattgtttggtcgcttcgatcatggaagcgataacgcgcattgggttcttgaagcgagcgatggcgtcaggatagacggagccgcgcttctggccgatgaaaacctgacgaacgctcttgcccagcccctgaggggtatagaactgaatacggtattccttttcatcttcgtcgatgaaggtgaagaacacatcgcctgcgttcttcttgcccatggtcagctcatacggagcggagttgaacgcttcgtccaactgatctctttcctgcatgaactggaggaaacttagctttgacattttatatctcctgactgaattaacggcggtttcttctaattagcgaaaccaaaagggagcgtcagcccccttatcttatttttgaacttgggctacagacatcgcccagagcgggagggtgtgggggtccagggcttccagtagatattcgacgcgctctgacatgataccttcagggaagtttacttcttctggttcgttgttggccgtccaacccaaggtcagtccttcagcgtgatggatgatataaacgaagtcgctcgattcgtagtccttttccatcaggtcgaagaacgcttccatctcttcgtcggagaagtagtagatgcgaggtacagagccgtcagcaaagtgctcagcaccctggaaggcaaacatgtcatcggcggtgaagttcttgagttgtgtcatgatatagttcctgctattcaagttggtgtcgtactgcttatggaatgaagtatagggaaggatattgaagaagtaaaggggcgaaagccccttttattgaattattttacggcgtcggattcacaaccggaatgtgggatcgaatacctgcgatgatgtccttcagccgaggattccatccatccaccaaacgggggagagcgatagcgccaggctggaccaaaatgatgtcgctgcctgtgatattgtgctgagggaactgggtaaggtactgctccatggtgacaccctcatcaatcagaaccgcaccgacgtcagacgatgcgtaggttgcacccaggccgtcaacaccccaagccaagatgccccagtcagggatgttggcttcagatgtgatagtgaatccaaacacggtgttcagtgaggtaaaggaatagacatcgtgggtgatgtcatacaccagataccccttggtcagcatatcggcaaagatcgcgtctgtatcgccaacagccggagtcggcacagtaaacaacagctcaccctcaggaggagcagggtatgtgctgagggcatagaggcaccatgcgtcaatacacttcttgataaatgcctccggtgcgacataatcagcaaggcgaaccgtacctgagtactcggatacgatgatgccttccttcgcaccctgtagagcaatgaagaccaagatatgttcatatccggcctgagatggagtgatgttcattatcttgtcctcttcagtttctctattgtgtgcttgttcatggcgatcacctgaggatctacctcggagatggtccggccttcgaaggacacacatttctgaagatatttagctttcttcacgacgtcggcagcataagcgttcgatgcaggattacgggcgaagccagcattgtaagaggagagggatttgcggatattctgattgtgataggtcagccagaactgcatctcatcgagggcggcttgcgcggcatattcttggtcggtcagcaactttatagcgacattggcatagcacttgcgattcttacaaccttcgcgatcaccaactgtcttcaccttgttctgaaaggctcccatgttggccgccttgaggccgtatcgcattgacactacatcttcgccagcgcggctctcacgccaagatatggcggccagagtgtagccaagatcttgtgtcttgcccacgtgataggcggttgccatcgtattaagttgttgctcggagaaattataaacacattggcttgtattttgggaagcgtgcacattcccgctggcaatggtaaaggtcacggacaaggccatggccttcaacgttgtcatcgtcatgatggcgttccttatgtttgtcgacttgcagctcgattgagcctcctgacaggggttaaaagataaagggcacgtggtatttagtgcccttcagcctcattcgtagatgaggtggtaggattcctcgatgcactccagccagccgtagacgaactgtagagggtcatcccatgccgtcttggtcgcgacggtaaagttgccgtccaggatctgcatatcttggtacttgttgaaagcgagtacagcatcaaccacaatcagaccaccctgctcaagataacgattcggagtgacggtcacttggtaatgaggattcctgtgattccatatctccacagcaatgtcacaggattcctgaatttcatctttgttttctgacatacgtttgtctcagatgttcagtaaaggatttacccagcttgcggaatagtttaatacgaccaatgactttgacgtaaacatctccgtggcaggggcgcggcttacaccagcaccccaataccttcccgtcaagatcaaggagttcatcctcagtgatatccccttcaatcaggcgcacatacaggtcgttctcaaacagttcgatacagacgcctcgtccatggtctttgacctcaaacgggttcccccatttaccaggccgaccaatgtagacgtcatatggctccttcttgaagtggacgactttcatttcaggatttgacctgcaagtagataacagaaacagacagagaacccgagataccccagtgatttcaggtagtttttcctttcgacttcacgagaaaacgcaacgatgtcaatgatgcatgcaaagaccaggattgcgagtttaatttgttcgtagttcatgatcaatccttcttgatgacttcagtcaggccgtttcgcaggccgtagcgaatgttgtgttggaagtattcctggaactcctgttcgcgctggctaataacaaacaggttgttcccgccgaacttatgcttcaacatctcaaccgattcctgcaccccgcgctcgctcatgttctcaaggatctcgtccagcacgaacaggttacattgtacagacgccttgaggttagctacatcgcgcagagctaatgtcacagccaggttcagacgactgcgctggccagtagacagggagaagatgctctgtcctttgcggcctgctgcgctcatggtgatctcaaaggtatcgtcaacaacgatgtccaagaacatgttgagggcttcaagatactcgttgatcttgctattgaggaatggcaagtacagggcgatgatacgcgccttggtctggtcatccttcaagaagaacagcaggtgctgtaagtcctggagttcctcatctgcatcttcacggagttcatacagagcctccagttcaccttccaacgcagcgatagagttctccaggtcggtggtaggtgttggctgtacagccagtttacgctccagatcggcaatagacgccacgagaggagcacgacgggctttcagctcggcgatcttatcatcgacggctttaatcccgctgacggcattctctcgcgtctgttgcagtgaagcagtgatgtcttcaaaacgaacgttcagtgccttacggatgtcaaggatcttctgttggcattcacggttcagcgaattacactcaatcgtggcagcatcatggaacccttgaatatcacggcgtagctgcttgatattgtcaacgatttcgtcggcctgcttgcgcatggcgtccagttcagcgtccaacacagcaatgtcagcaaccaacttatcgtcctgagccttgtgatcatcgatcaggacattgatatcggcggtaactttgtccagttgatctaacttcgactgtagatcctgaatccgaggattgtactcgctttcaatacgcgccttggtatcgtcggacaccagttgggtacatgttgggcaagtccccatgtcgtggaagcgcttgatagccgactggtggccatccatttcggtctggaacttgatacggaagttctcaccctgttgacggcgctggatagcagcgttcagggcgtccaggtttgtgttgcgctcggtgagcagggtgttcttgcgttcggccactgtaaaggcgcggtcacgcaagacctgaagatcatgctccgcagtagacacttcgatgcgctcataatcgtcagccttgtcctgcgcggcgtccttcaccgcctggatcttggtatcaaagtctttcttgacagcctcgatctctaccatggattcatcatgcaggcggctttccaccgtcttcatttcctgggtggcttcaaactccacagccgtgaggcgggtgcgctcttcattctgggcggcgatgtcggcatccaaggaattcagggcttcctgttgctgtacaaggatatcggccgactgctgttggatcagggcgttggattgctcgatctgctgaagctgcgtcttcttgttggtgtggtcaacaaccttcagtgcgcattcgttagatatagagtccagagttgcatttgtccttttgatggcggccttgacatcttcgttcatcaggctgaagaagcccaagtcccagatagtctccaccatcgcgcggcggtcggctgtgtacatctccgtgaacggaatgaacttctctttacccagcaccagagagttctcaaacatcttctggtctacaccgatgagattcacgatgtacttgttcatgtcggctttggctgcttcgttatcgatctgcaaccacttgccgtccaccatctggtagacttcaacaaagtcaggtttaatgccacggcgaaccttccattcgctaccacggcaggcaaactctacctcacccacacattccttgcggctctgtgagttaaccaggcctgccttcttctccttcttgctgtatgtgtcgttgtacagtacgaaaaacagcagccataccagcatcgtggatttacccgcgccgttgtcatcagacgtgacaagggtggccgggttgcgctgataatcaatctccatgaactgattgccgatggagcggaagttcttggcgcggcctttacggaaggtcagtttgtgtgtaacaacgttacgcacttcaaatgggacttcaacctcgaccggggcgtcggcttccttcaaaagattaccaaatttggtcaagatatctgtgctctgagtcatgttatgcatccagtttgttcaggcgttgttgggcagcattatagaagtgctctgctagtttacagacgttgtcggggcgctgaatgttgttccctgcgcggatatccttcttcaggacttccaccgcatcggtcgccaccatctcttcggtgacctcaaccttctcggcagcaacagtaatcgtccggtcgatgaagttgtagtcaatacacttgcatcgcttcatcgcatcacagaacttttcataatgcttagcattgtcacggttctgtacaataaccttaacaatttgcccttcaatacccaagcctgtgttcaaccattccgggtcgatccaattaccttcttcatcagaggacaacttggtgtaatcatattccacatagcggaacagcgtctggtgctcggcgttcgggataaagatctcaccaccacgcatgtcgtctacatagaagccacggttggtgccgtctttgtagtcttcccagttcaggtgatacggagtcccaatatattgaatgttaccttccatcgaacgggtatggaaatggcccgtgtcgaccctggtaaacttggaaagcagagcaacgtcgatctgaccgtgatcacaagtagaagactgatacattttgaaccccgccagctccagatgcgcaaaacagtactcggcgtctgtatcttgtatcgctttaatagacgcatcatagttctccttgttgatccaaggcagcagcagagtcttgacaccctcgatcatcacttcggtcggttcgctgtaatagcagtacacatccgggtcgagttcgttcaggtaggatggccagttgatgcggttggactcttccagggtgatgtcatggttgcccacgatgccattccacttgataccagccgctttcaatgcaggggtgagttcatccttcagccagtctttgtcacgaccgtacatgaatttgcggacatcaaacgtatcaccgaactgccagacctctttgatatcagagtcggcaagttcaggaatgaaataattgatgagatagttcttgatgaagtcgcgaacgtatcgagaaccattacggctcccgatatgcagatcaccaattttagcaatcgccattattctgtttctccttcggtttcgtctaggccgaattgggtattgccgaagtcctgatctaaattttcttcggcctgcgctggtgtcgtattcttagcctgcgccatgtattgaagtatgcctttcgcaatctttttattcgattctgcgagacgagccgcctccaccttctctcgctccttctgcctttgagcgtcctttttgttctcaaagttgccgatacgttcacggaagtccatgccaattcctgtagcatcaacaaagatctcttgttggaagtcgggatcgtctgccaggcctgcgaacccacccgcctcttcaaatgagcgcaatttaatgtacgtgtgctcttcttcgatgttcagtttacgggcaaatgagcgatcagcacacatggttacccaagaaaagaagttgatcttccctttctttccaatatggtcgacgtcaaaggtgtggaggtaacgcaggatgttgacgattgcttcagagaccatgtcttcacggaagggataatcgcgatagttgtagcgggtgctcatcttggtgatgatgcgctggacctgtagagcaacatagttggggatctttggaagcctggtgccttcagccagagccttcttacgagcagggatccaatcacgaaggatactgatgacacgctcgttatcttcgtctgtgaaatatttgacgacattctcccctctgtccacgaagttcattcccattgtgatagccctcagataccgataaattcatcaaaagatccaacaaccttcttcaccgagatcttgtcattctcaatcaggaagttgctgtcgtttttggctgctgtggcccagtcatcggcaagttcgttgccttcgtgccccgcatgacccttaacccattttagttcaacatcacaaattgaacaaacgagatcatagattctgaacagatctttgatgagttcaacgttcttttctgggaaaccctgatactcccacttcgctcgccattcggtgacgctcttgatagcatattggctgtcagaccaaattgttgcctttggtattctgcgctcaccctttcctgagaatgcccacagtagcttcaatgcgttggtcacacccaacaactcggcgatattgttagtggacgggggaggtagatgaccgaagaacaccttccattgcatacccgttattggcctgatgacaaatgcccatcctgcggcctggttggtcttcgggttagaacccccgtcagaataaatttctatcatgatataaatatcccaaactggttttatagaaagaggaatgaaactatggcaccccgcgcatatcgtttcagtctcaccgccccgcagattgagcaattgctcctctctatctatgatgctatcaagtcagaagatatcatctatgattatgctgcaggtgggactgctggacaagtcgcagcagcttctgctgtcaagaacatgtggttgaagctcaacgagatggtgacaggccaaggtctcaaagatgccatcaacgatgcagaagacagcaacgtgttcaccgactattataagtctttactggatcgcgaaggctggaaatttattggatctccagcagatgaacttcagcgaggcgacatcgatacctcgaacttcaaaggtggtgaggtcattctacttcagaagaacgcttcgggcaacccagaattccaatactggaagcgaacccctgttgctgggggtgatcctacctttgcatgggcttcggtctatgaagggaactccaatgattccagcatagagattcccgtggttggcaccagcgtactcaaggacatccccaaggcactcttccatatgatcgagttcagagtgcatgtctacgatgagacactgggtcattggcaagacacagacgggaaggtagggtatcgtggcgaggatctgatctacagtgtctacaaccatattcagaccaaacctctcgccaccattgacttcagccaagatacggacaatatgacggtttctgtgacgtcgttggaaccgaatgtcaagtgccatctgtccttcgttgcgggttactaaacctcaaacacggcatcagtgaaccaagcggggaagaactctgggttgcgcatcatcagtgattcaaaagaagaatcaaggatgtacgtcgcagcccagtcattcacacccctgaccgaacgcccacacatctgaacgatacgcagtaccgccatcctgaagtacgccgatgggtccacgctgttgacgtgggccaccagaggatcaccaaggtaatcatatggcaccttgatcaagatctgaaatcgactataatcgcctttgaagtcatacccctcttccatggccggactggcgatgacacaaggtgtcttcgtcctgaacgcgtgttccatgatgtccatcagagccttacgagtacgaggaacgtgaatcatattccggtacttactgaacttttgtagagccagggcgcggtcataactgactgtgtgaatgatgccagactgtccagggtggaatgcgataatttcatccacgtattcagccagcttcttcatctcgtagtcacccatgttcgctgtcatcttcatgatgggcatgtagttgactttccggttctcaatcgggatagggttgccgatctgtatcttgtggtactctccctcgcggatacccagtgaccgggcgtacgagtcaatcccacaaatggtagccgacatgtgaacgtggtagtcacccttgcggaacaggccgaactgggatacatcagaggcgatgacaggcttgaactgaatcatacccttgtccttctcctgcacgatgaaagtgctggcgttggtctgccccatgataccacagtagtcgctgaggttgtgaagagtatcaataatatcagacagcttcatcacctgggcttcagtcaggcgctcgtcctctaccagttcctcaagagtttccaacagggcttcaaccttgccgtgcagttcatcaaatatcgcatgcatttcaccagacagggaatacagcttgcccaattcatagttctctgtgcggatgatgatatccttgatggtctccacgataggcactccctcggggatcgtaagcaacccttccacagcctttatgttgtattccatgatagtatgctctaggagcgtagagggcattttatgacactcgtcaaggatcagcatatcggcgcggttttccggcttcatacagatcgtcgtgcacatctccaccatcatggcggcgttggtgcagcgcagggaggagacgtcggtccactgtcgacgcgcctgaacatatgggcaacgattcttactacagtggccatcacggcatgccatacggcactgaatggcgttgtagtataggtcgggactgatgtggcaacgatagttcttcttgcccttcaggatgtctatcgccacggctttctctgctgcatactgatcctgtaaacctttggtcggcgtcgtgatagacgtgcggaactgaccatacgggttgtgctcaagaaccaaatggcgaagcacgttatggatggtagtgccgatgagggatttacctacaccagtcggagcctcgatgatcacgtgtttgaatttcttattcacaagggcatcaatggcttcaacgatgcattccatctggccggggttggcggtgtcatacgggaagaactcagtggcaagagacttgatgcggtctatgctgactggtccgacgccgtcaagcgccttggtatattggttgaatgctgtcactttcttcctcctatgggattcgcctttagtttaaccgattcccaggaacgaaaaagccggagtacaatgctccggctttctcttttgccttgccctgattgcagagcctggccgcgcgtcagatagaattacttgccgttggcagcgttcttcagaccttcgcccactttgaatttcacaacgtttttcgccgcgatctgaatggtctggccgttcagagggttgcgaccttcacgcgcttcttggtgtttcacttcgaacgcaccgaagccaaccagctgtacagatgcgcctgcagcaactgcagttttaacaccgtcgataaaggatgccactactttctccgcttcgcctttggtgatattctgggtcgaagcaatgtgggcaacaaattcagtacgattcatctggatttctccgttgggttaatgtttactttcatgttcactacaagaggactacatcttacctaacaaaacatattgaataaagcgaaattattgggtgtttcctttagagatgaatgattccatgtctgtccgggaaataatcgtttctacacgatcttcatcgatcaacatttcgttcagaagatcgtaccccaggacttgtacaccacgcacaccccaagatcgtttgttcagttctgcctcaatatcgagaactcgctgaaccgtcaggccaccagaggagaacggtactggatagaaggcggaacgcacttgggcacacccatttacgctgtaacgaaccagcaagacatcacaccatacgccagccatgtcacacctccaccgcgtgagacttcaggagttcatcaatctctttctgccccatgtatgagaacggggtgcgctggtagaacgcccagagtactaactggacaacagcacgggaacgggtttcggccgtcatcaccaggccactgaaatgaggagactcagctgtccattgtatctcttcgcccatgtcttgattacaggtcaccgagatgcggaacttgttgcacagattgtcgacttctttgtatgcatcggtagacacacgaagttgttccgcatgtacccacgaagttgtgacgattctttcacccatcactttatcagagataaaccaatcaatacattcggtaaactcactaaaatggtcgatacgataaatgcagtctcccccttccatagaacgcatggcatgatagcgagcgtcgatttcgttgttgtgcatcgcgttgaagtcgatgaacacgcgacgcgccagcacaacatcttctggttgaagtgccaggaaatcgttcaggcggctataatggaggatattggaaccgtcgtggccacgtgtgcaatatgcgtaatggctaccgatacgggcgtgggcaatataagacaacggggcgaagaataatccgtcaggatcaggaccgacgataatagaataaagtttttccatgatatagtcactcaaatgaaagggcagctttatgataagccgcccgaggttattgattattggaaatcgccaacatacatgttcagattgtcatcccaattcagaacgacacggatcgttccggtgtcttctgggaaggtcagtttgtcacacatggcgcgattaacataagtcccgctctggttgacgttgtagtccttgccttgcatgataccaaaacgcttgaagtcgcgagtgaccatcatgttcagagttgtccaagggattgcatcgcgcagggctttgcacaggatgatcttaccatccgacctgaacgacacaaacagctcgttagcgatacggcggcgagtaggcggttcaagttcacgcagggaaatgaattgtgaattctttaccttttctgccagcgcctgtacttctgctggacccggcttgaacggctccactgaagagtcagacttcatcacaacgtcacccttgcgcttctcgaccaattgctccacagccttttgactcactggagggaggtatttggacttaggaacaaccgctggcttgatgacagggcttgcatctggtttcgcctttggggtactccgagccgcacgcagcttttcctgggcttccagaatgcgctcttgacgagaaagcggagcctttggggtgatcttcgtactgaagtcagaaacgccgacccagtcaccctggtcattacgcttggcgaccagagtcagtttgtggatgataccctgaagtttgctctcacgtaagttgtcggcataccagaacttcgcgcccatctcgaacttctcggcgaagatcacgcgagcgtcttcgtgtaccaacataactttggctgcgttgggggcaaaagccttattcttttcgataatcgccgcagcgattgttttggtcaggagcatcacagtgtattccttcagttcacattgtagggctaaattttaacccgaaactttattttgaaatccgacaaagtcctgggcaatcccccgacaatacatcaggtctttcttcgtttgtggactgttatcagccgcagtcagcatcatgggaagatccagcgcattctctatctgatcaacactgaacagatcaaggcgcttcagctccccctcgaagtcggacaggaggatagatgtgtctttgtcatctgggtggaactgctgatacgtctccatccatgctacacatgtgttcagtttggacggtggcgcggcgtttacacacccggctatcagtaccaacaagagcaggattttacatttcatcactcgttctccttcatcatattgtcgcagtcaacacgagtctgctggagttcgcgcgacatgcggggatcatcaaggttcacgctcagattcgtggccaggtctttcagaccgttctgaaccctgtcttcaaagtaataatcgttctcaaccagccaggctctgagaccaagagcgcgggtgcgccattccttcttcaggacgcgatcagaggtctgcgtagcgctgtattcgaatactttgatgcactggttgccatcgttgataaggttcaggtggcggcgaccaacctgcacacccttctgtaatgccggagaagggagcgaacggcactgtcttacggtcattcggccttgggtgcccatacgcccagtcatgatcaaatcgccagcctccatgcctccacggttaaattcgtcgtcattgaggtagcctttgaggttataggctccctgtttgtaacggttgaactcaattccggcattgatgacagcagtggagacgttgcctgtgttccagagttcagcgaagttctctatggaaccagacttgtcgatggcaaccgcctgggagaacccagcacaataggaaaggtcggaccacagtttatcacctgtggagttcagcttggcagcggcgggtaatgccagaccagccagcacaaccccgaggattaaacgtttcatggcgattctccttatttcattggatgaaatgataggcggctcaccatgatgagtaaagggtttcaataaactatcgtattcagaaacgggtatcgctgaccgttctgtatcgcacaccctgaaactgtttagcgagtttaacaaattccatcgctggcaaatcaactttgtagaccttcatgcgctgtttgccgtccatgttcaacgcagcgacaaatcggtgagaaccgtcaacaacgtaattgtcagaagacacccaaactcgacccataggtttcttatttctgatctgcttcataatcttccagaccttcattttattgatttcgttctgggtaagacgaagcattttgatgggcacttgcacagcatctatggacacgccgttgtcttcaagatatttgtgaaaatcttcttgtttgtcggcatcgatttgtggcatagaagaacgcgaaagcccgaggttcccaacagggatcctcaggccgttaatgatgttcaaccagtcaataaaagatgtaaggaacatgacacacctcgggatatagggttatcccttagttagcgcatccatcgatcctttctctctttctccttgcgttcgcgacgtttctggtcggatcggaataaccaatagaagaagttcccacccaagatgaaaaccaccgcgattattactaggacacccttcacaatttcccaaaccaattctttatccaaattatacctcgtcttcttcaggtccaccgtcaatcaggatacgagcggcgtcgaaagtttccccgcccgtgttcagtagcttggtcagatcgtcaagatatcggaccgtgccaagatcagatgaccgcgatataaactccagcatgccatacaacgctgtttggaatcggctgttgtcgatatcgttctttattaccatcaggcgcaagatgttctctgactgagtatggtcaacacacgccttgtctctgatcatctccttgatagaacttctctctgatggtgtcataacgtacccccgacagagatcaagaactcttcttgcatggtcttgaccgggtggtggttgcgggtttcgaacatgaagccccagccaccgtcggcgacgttgccaaaggtcttgacgccaaaggacttcgtcccgttggagcaggaatagatgtccaggacgtatgggctaccctgattgtcgatcccacgattcacgtcgtctgatacacagcgctcaatcatcttcccgttcttatacagaacgaggtcttgaccatacgccttgaaagcataaacaccgttggtagacactccggtgatgacaggaggggcggaaacagcagcaaaggaagcgcccagcagggcaacagcgaggattaactttttcatgatatagtctcttggtttcaaatgggcgggtaatcataccccgcccaaagttatagaattagctgatatgcttcagaagagcgaagaggatcacggccttggcctttacctttcctacgatgcctgtctcgacatcaacttcttcagcaacccactctttgcctttcttgctgatgataacgtcacggcgctgtgcgtagacttctttggtcgcatacacacggcggaaccctttagcgcggagcaatccccaattgcgatcaatctctactgaggtttctaccatcttgttcttatttgacattatgccaccatctccacgacttctttacctgtgtcaaggtgaactcccacaaagtaagtcgggtttgttctgaggccacaccctttaattttgacatactcacctttaacttgttcgttttcaacttcgaccacagtgtcgacgccgtacttgataatcatgtgcgtcaattctttggctttcagattgccgtctttatcgaggcgggcatagatgtcaacgtaaccaggcagtttcataatgtaatccttcatctcaatctggtgaacgccatcgttcgccagttattgaataataggacattccttagaggaagtaaacccctaaaagtaaaaatccccaacgtttgttggggacttctgttatttgcgcagggcgaccacgagttcagcgagttcacccatggtcgggtcatcgcctttactacctagccacccgtcgtcgatttcgacctgaaactcttcttcgaggtccattacaatttcgatagcgtccagttcatcaccgccgaggtctttcttggtacggaggtcagccagcttgtccagggcgtcctcgttctgggatgccacgtcgtccagcaatttgcgcttgtcatcgtcacgccacagatccaagttcagattgtcagtggcgtactgagccagatgacgcatgacttcaacatatgttggtttgctgctcatgctacttctcccaaagaaaggcgggttgccccgcccgttggattagattttgatttctttctctgtcagttcggcagtgaccttgtacttcaccccatccacttcaacttccatggtggactcttccaggtcgaggtcggtgaaccagccgtggccagcaacgataccatacaccactttagacagtgtcttgttcagggcacggacttcggtgatggccgccttggcagcagcgtcgatccagttttcgatcagctgtttctgtaaggcttcaggcacggcagtgatcataggagacttcacgaatgcttcgtactctttcagagcattggcgatgaacaagtcaccagcattgagtttcttgttctctgcgatcttcttctgtactgccgcgatgctcggtagtgaagacgccccggcgatcttcacgttcagctcacggctcatgtagaagtcggtagactctttggtctcagtcttcggtgagaagccgtaatcgcggatgccgtaagaggacaggaactcggccgcctcagcgccgtactgtactgccaggcctttggcgttacccttaccaaccagggcgtctcgatagaacttcagcaccttctgcttgcctttcagggcttccagacggacattatccgcaaagaactgagcagcactgatgttcttgaccatggcgcggttgaccagtggtacgctttccaggttcaggacaaacacttctggaccaccaaacacgtggacacccatttcgatcagcttctgtacaacttcgatatcagccttgaacggcagagtcttcacgttaatgataccgtctttgacgatggtgtagttgcgccactggaaagtatccagttcttcaggcaggccaaacttcttctgtgcaaattcaggcacagccacagtaccgtgttgaattgtacgcacactgatgttcgggcgctcggagttatagaccaaatcgctgattggcacaacacccaggtcgttggtaggttcgaacgtcgggttccactcttcgtgttctgccagcttgagagccagggctttacgctcttctttggactgagcattcgcgatctgttctgccagcttgtcttcggtgtcgtcggttttctgcacagtaccgcgcccgatgctcttataggagaacatcggatgcttggtagcaacaggcacaccagcttcagccaggtacgtcagcacatcaacgacggtggtcgcatcttcagccggaaccaggtcatagtcaataccgtcaacgccgcgcagctggtcgtcaacaatcgcctgaaccagatcgttcttgatgttggagtagtcctgcttggtgaagcagttgctgtactgtttgatgaagcgaacgtcacccgttttcttcagtgcagcccacaccagatctgcgtccatagtgtgtacgccgtagaacgccagcacatatgccgcctggatgtccgtcaggctatccatctggtcgatcatgttagggtttacaacccacagcttggtgacgctctcagggatgctcacatagccgaccgggtgagagtcatcgtcctgtactgccagcacggttgccacaccgttttcgacgtagatggcatgggtgtagatgactgggacatcaactttcaccttcggtactgatgacttcagcacgttttccagttcggtctggtattcggtctgaccttcggcaaacacgtgggtcgcaccggagcgctcagacatcagagctagcagttcgcggttacagtaccagccatattcgataaatgtaatgttatcgaaagcaaatggcagggtctcagcaaccagtagaatttcgttggtacgccagcagttgtcatacccgtcagtcatgaacgccaggttgttgacatagccaggcttcttcaggccacgagcagtgtccatcgccagtttcaatggctcaacaaaaccagtacagccggatggttgcaggaagcgatcgatcagtttgttcagctcgctcaggtcagacgcagcactaacctggcggccagcgaacacagtaccaaagtcgcctttggatgagaagtacagaacactcacagtgtcttccggtttcaccagggaaggcaggttctccttcagatgcttacggacttcagggagtgcacggtacatagagccggaaatgtctacaacgattacatggttggacggagcagcagtcgcaaccgcattcttaaattctaatgattcaatcattgttctcttcgccttgtgcgtaagggttaagttcagactcatcagcggcttcgatacgcgtctttacagagtccagcatattgttgataaactcacgagactgctccagctgagccaagagcacatcctttggagcatagttctgaatgcaagccggaatactttcagacgtcgccttcaggtcggtaaaacattctttcagtatcatttgatctcacttaacagagacgacgccctgttgggattcaatagcggtcttcacaggcatcaggtttccctcaaaacaggggagtctcctccccttcggttatcagatttgtgaggccagttctgtcaccagaggagcggcacggacacgcgcatcttccagcgtttgggtgttgaagaactcgccatcacgatacaccagctggtgctggttgtcggcgtcttgcacctgatcaaaggtgataccgtcaaccaacactagtttaccctgagagtctttaatgactttaaggaaaccacgcgcagactttttagtcccgcctttatcggtcttcggctctttgaagatctcacggaattcaccgttcactttaccagccgtggctttcactgctgtgccagtactgtcacgggtgttcatctggtaggtgtaggaaccgataccgaacaccacgttgatggaagcgaagttccggtcagccagacggctaaagatctggtcttcacgcgccagggtgatagaatcaccgtagatcaggccgatgtgctcatccaacaggaagtgcccagtttcagtctgggtgccaccaaagatctcccacaggcgctggatagagccgaccgcttcagaacggctgatgatattacggtcatctgccatcagagagttgatcgtgccttcgcctgtgatcaggtgataggtgttcgtctcttcgatgtggataacttcggtgctgctagacacgccgctgatgttcagcgtagcgcggtctttgaacccctcgatacggtagccgccgacgatgtgtacagggtcgcccgagtcggggcggatcacgactttaccattgcgcgccatgataatgtctttcaggcgagggagatagtcgtcgatgacctgccagtaatcccacgcatcagacacgatgctgacgatgccatcaggatacacgtcctgcaccaggcggcggaaggtttcgaattcaccatccttcgtgcccatacacatcaccgcatgttccgttgcggcaaccgacccagcaacgacatagtcttcgtcgatgtctgcgccataatactcttctacgaagtccagggcagggttggtgtcggtgcctttgaagaacaccagatgaccggaaccggaagacgcggcgtcatgccacccgctcataccacggaaggagaagtcgtggccttggtagtcgatgaaccaatggtctggtgatactcccgtagcgagggcagctttcaccatcagtgccttgtaatgcagagcgatggtggcgttcgtcatcggcttccagatctcagagctgaacacagtctccagatagttggtcagccagtagaactccggcagggtattgaacatcacatacaccggaacaccatacggacacatggtgccttcaggcagcgcacggacttcgataggcaggtagccgaggtcatgcagggcttcaatatgctctgtgccgacgcggcctggacccaggactttgttcatgcgacgggcatacttcttcagcaccttgtccttcgggcgctggaagaatgcttcgtcaaacagttcgtggaaccaggtcatgaagccctggatgccccagaccaccacgccgttcttcggcaggtgagagttgaacagtttgttagagcgcggagttccgttggagaacaccagctcactgccttcagggaactgatagatgtgccccgatttgtagaagtcgatcgcatggattgggtctaagtggcgcatgctcattttacacgtcctgtattttcagttttgaaaggaagcccgtcggcggtgatgttctcccaccagacagtgtcggcatacacagcatcatagatcccgtcgaaaacagagagacctttgctgaagatgccatgggtaacgaagagcgtcatgtgcttaggcttgtgcttctgaagctctttgcctaactcaacgaacgtgcgcccaccgtcgcagatatcatcgaccaccaccagatagcggtctttgatcagttcagggttcgtaatactcaccccaatgatctcaccagtcttggtgtcacggttcttgtgaccgtagacaacaggaacaccgtccaacgacagactgagggcttcggtcttcttagccgcgccgccgtcaggggccaccaacacagcgttgttcccacggatgaaccagcccagatactgacgcacaatgtaatcttgcgggacaacatggacgttgttgatcagagaagacacaacatggctgtgaggatctttgatcgccacgcggtcaaagttcatactattgatgaactcagccgcccacttcacagacagaggctcaccgaagtcacaatgacgatcttgacgcgcatatggaaagtacgggatatatgcatggaatgtcgtcagacggtccacgttacccagaccacgaacggcgtttaccagaagcgccagctcaatgaagtcagccgatgatttgatgtgagcatcaatcgccacgttctgaacgtggccgatagggataccagacttttgaatcttgatatgttcctcaccacctgggaaggtgaagtgcttgtagaacacatcttggtcgttcaatttcaaacgaaacataatgcagcctcatggtgtattgtacagccgtattatactgtgatacacaaattgaaacgcccagcatttacgctggacgttattgatattgaaaaggttttgacaaactcaggatttggaggaagcgcccttccatgtctgacgtttgtagtgggaagccatggccatcgacccggcgtattgcgtttcacccctgactaccacagccacaaccagcttatgtcgcaacaggaagtccagacctgacttagacgggatatcgccaatgctcagtggaccacgattgtacagggcatacatggtgtcaagcgccgccccggtaaagataatctctttagacatggcggtctcacttaaacgagtcaacgatggatgtaagaatttcgggggtgggtttggcgtcttgtggttcacggaaacccacctttgcgatgcgacccaagacattgtacacttcgcgcggaagggtgtctacgaccgtgtccgacatgaacgccacgtcttcttggatggcgttgtattcggccagtttagccagttctgattctaccagggacttcagcttttgcaatgggtcgttgcaatagttgagacggttgcagttggtgagcgcctgagttagattctcaaacgcttcttgtatttcctttgacattgatatgtgcctcgtattgttgacagacaacaactactttacggcacatgtcgatatcgaacaagccaatatgacactcacgcttctttatccccagcttatgcgccagccaactgtaagcgtcgctcctgctcctctctccgcttttccacaatgggtcaaacgatctatgggcttcctgcttagcagcacggagagcggcattcgccatccttcccaaaggttgtctgccgtcgccatgggcatggcaaccgacacgggcatcacacggggtgcatatccagaacttcagattgcggaggtcagggcgatgagggtagagaacatcaccaccgacgaattcggctgggaggccacagtaatcacatataacaggtttcatattctttgtccaaaagaaaccccgc

SEQ ID NO: 14 - DNA, 169160 bp, unidentified
  source 1..169160: mol_type = unassigned DNA
  misc_feature 1..169160: note = the genomic sequence of a bacteriophage
cgtcaaataattctgtaataagttccatgatttatccttgaacgaacttgtaaggcatgtttgtaatatctatgcaagacgcaataattccaagagatgattctactttctgtttaacatttgatgaaacaaatgatgcaaaatcaactctatcttctatttcaatatcatctgtcattgcaactacttcaccagtttccattagacggtcaccgtcataaattaccgattcggtgagttcttccgtagtcataacttcagcttgaataagcttgttgttagttttagctgttccatcattgtaagatgcgtcggttattttattgactttgaccatcaatccacgcggcaaaatgacttccatttcatttgaaggcgctaaacttccacctggtaaaacaacgttgactttatcagccccagtaataacccatccaattccaactaaattatcgctagaattaacaagtccttcatcgtttttatcgatagaaatgtttagacgcttttcgtctggtaaaacacccacagctgaatcagtcatccaagtaccaaaaatgtttggatataatgatgttgatacaaaatttctaaaataaaaaactcgattttttaccagtgcttcatatattgaaggtaacattcgctgtgaacgatataaagtaataccttttggcagtcgatcaccatttttaaaggctgaatctaaattatcgatggcttgttctatttctggtgctgttaaaatacttgtacgctcatctggattatataatcccaaaagagcattattcatgtctacatatcctgaacctacgtattcacgaattccgcgtttttgtgccggtgtgtatttagatgaatctttattttcgactatagaatgcaatgaccatccaacggtaagagcatatccacgtaattctcttcgaataatctttgtttttattgcattccaagaattttgcactaactcattcgcagcatcttgatttaaatgcgaatgcttgttaatatttctttctaaccaagcacctttatatttttctaaagtatcatcaactatagaagcaatagtttctaaagtttttattgaagtaatagattcttttcgtaatctttctaaagctttattttttatttctgcattaacatcagattctttatcttcaggaattatagaagcttctctgaatgccattccagctgtaacactattaagagcattctctaatgcaaatcctgaagtagaaataacagttaattcgttagcatcagaaattaaaggcgcgtcagcgggtttatttaattctgctgctgaagcctcaaatttttgaaacattggtgtttcaaatctagaagattctaacgattgactttgtgcaattgctctacgggaaattttaactttaacgattacagcttgatcagaacgtttatcgttttcttgcgcaatagatgctgcaattgcctcatttttagttacttgagctccagtatctttattgatataaacatcaccgaccttcgattcaactttagtaaagagctcggtactaatttccggaactcctggaatgtcttctaatgatacatttttgcgatgtataagaatatatgcgtactttttatcgtaatcccatagttccttaagaaggacgtatctgccacctgaacgactgcggataagtctatcagcaataagttgaatttgacgagcttgaccagcagttttagacttaagaatacggagcatacaggcatcaattttatactgacgcatcgtctgcatcgcaacagtaaaaactgaattgatgtaattaattgggcttggaccgagaccttttaatttagcgattgaacctttagcagttaatgtaaaaggaacaatatgcatcattttatcgcccatctttaaatcgcgattagtatcacctccagatgtataggtacataaacgaaagcctggttgttcaattgcgtcatcaacatgaactgaaaaaatttgcggtattttcttctttggatttaagtttgtaatcggaagagtagtatcttcgtcaaataattctgtaatgagttccatcatatcctctctagtgtttattctatttataaaattaaaggcccgaaggcctttaataatctattggtaagagagtacgatatatttcaaactttggacctttttcataggcatcaaatgtttctgtgaatttattataagcatatgcatctataaattcaatcataatttgtgatacagaagtagaaacatctccaccttctttttgagccacgacaattgtttctaagtaagctttcatagaccagttacctcatgaaaatcaccaaatacatcctcgaatgtattagctttagttttatcttcacgtaaacgaatcgcaatcggaagaaataatttaacgtaatcagtgcggccgtcagattttaaccaaccattgcattcacattctagaatttttccaatataataattttggttttccataatgcgagtacggtcaagttcatgcgattttacaccggctttatcttttaagcctgaaccagcatttactttaatttttccacattctgattcaagaataaatccacccgctttagtagggtctttgcggtgaggataaattcctacaatttttaaatcaacatcaattacttctttaaatttataaagattttttgaacgagcattttcccataatccatcggtatttttgagaataataccttcaagaccttggtcaatatactttttataaattaccttagcttcatctaggttatttactacttggttttcaattaaaattactttatcatatcctgatgtcatttgttctagtttagaaaaacgtacatcatattttaaacgaaacgctggaagaccgtatatttctaccaacgggacataatcccagacctgaaacttcatgcattgagcttctttttcagaaatggttccctttaaagatttattggcaattccattagaagcagtacgagattcagctacttcggcaaactctttagctttactgatttcaggagcatcaaaaagaaaatctagaccttctggctctttttcaacttgctcatggtataccaattcgccatcgattaacacgccttctggatgaatctggcgggcttcaacagtcattttgattaactcttccttaagaagatctaatcctagatattcattaccagctcgtgataaaagacgaacatcatctaattcatcgcctcggacttcagcaaaacaccgagctccatctgcttttaactgtgcaaaggctggaaatttgatattcttattaatgcccttttcatcataagaacttgccagcatttgaggttgttcaggaattaaacctggccaaactttatttgcaatagatactgaagcaccgcattcaaggtctcgcatcataactcgacgcaaaacttcaacatcatcctttttaccatcagtgatatatccagttaattcctcaattgcagcatttccagtcaatttccgagtagctaacgtgaattcaatgaagtcaagcatatcggtaatagtcagcattccaaaactctgggtagcaataccaggtttaggccatttcttgatataatactgtaacccacgagaataagtcagacgatatactcgtttaagcaattcattatctttattcttttcaagaattgcttgcttctgcttagttgatccaatagatgctatttcattcagaattttaagaatcattgttcatccttcagagtttgatttacatctctattataaatcaattcatcattaagctcaggcaaagacttgtgatatgtagttctaactttatttccttgcatccagtgcttgacgtaaatgaaaccttgctctacacattttttaaaaattcgttcgtctttttgagctcggaattctggattgcatctaaaaaaattgatttacgtgaccgtaatcacgtgtagtattaccttcattttcataaatagtatgaacaacaaacattagaatgctccttggaaaatattatcaccacaagtaggtctattatacaaatactctataccaccaggtttaatatagttccatgtctgaaatggatgtgtctgatatggatgatatagatgattataaggattaaatccaggcgttctccaggtagtgttccaaggaaaagaatcgtttttaaccatcttctcaattaaatcttttatagctttttcactatcaaaactttctttattttcctttggtgaaaaaagcttattttctatatcattccatgtataaactcgctgggcagtttttggaatattgtcacgctctcctcgagccatccaatacacaggaacatttaatatttcactcgcatgatcgcagtgatgagcgagatcgtcaatataacaaattacgttatatttctcttttgcctttttaaacaactcttcttttgaagaatcatgaccacacatcattacttctgagaaggcaccaggaaaaagagcattcaaattaaattgacgattcaacagagcgtcaatagaatcacccaatgctgtgacagctacaaaattataatcttcttttaatttgttaattacacacagggcatctttatatggagacaagtaacgaataaaatctgatcgattgtatttttcaattagcttgacaccgagttcttcatcacaattaaagagtttacctggagaaataaatttctcatcttggatcatttttaaaatatgttctaacggaagattatatttctgagcaaaataaggaagacctgattgccagcttaaacatactccatcaatatcagttaaaatagtaggcttcatagagagtctcttaataggtttaacacatcaataaattcagcttcggttaatattgtatcatcttttgttagaccattagccatgctgtgcttcaaaacttttcctttcgaggcttgtaatgcatcacgaaagcccttgttttggaacgctgcttcaaaatatgcatttgtatataattctttccacgctggagagtatcttgaaaacggaactccaagccagaagagggtcccacggtcctgagctctagcataagaccttccagcttgttgagcggcaagcccggataacccaaatatacgacgttgctgttcaacatttttcaccttacacccttggaggaatccttcgagacctccaaattggataccatccataacaaaaggccattgggcgaaattacttaatgcgcatgatggccatctaaaattgcttctaatctctaactcagacattttcaatacttataatttcaacatcagcccaatgaccatagcaaggaagacgaaattcaactggccagttagggtccttttctaatataatagactgaacttgtggctcttcatattcatcggtatacggacctttatacgttactttatatgtgactttaatgtattgaattccaaaaatcttattaattatattcatactaattcctttaatccgtaaataggagataattcatcacccatacgaaggtcttcatttccatctacccaagaaacaatataagcctcttttatttgaacaccactccatttaaatggaggtaaaaccttagaaattaatccaggtataccaactccctttaattcaacagtttgacctaaaaagaatttcattagaacctcatctgaaaaccatgcgatttaacattaccgccgccaatatcagaaatattaatttcacgcgcaattgaagggtcaatgtcaatttcacgattgagtttagcgatagctaaagtatcgcgcccatttactgtacggaactctaaaggacagactacattaacgtagtttttaatcgattcgctggtaggttgcaaatgagcaggaaggtctttaggcgccttagagaaaaccacttcacagaaatttttgcgggtatcaaaataagtagtcataaacatagtattttcctcagtaaggggccgaagcccctcattttattttaaatatcaaattcgttaagaactacatcaaagattgcttcaagatgctcatgtttagctctgttgctcagaatatgacgaatccaagttttaaccagaagcttgcgattaacaccattccagcaaggatgagtccctaaatcgcgttgacgaaaatcatcatccagagcgattttgaagttggaaccttccattgtgattgaaaccgtgatgccattttcaaatcgcatataaacgtagttaggggtcatatactgttcaatttcgcatactgatccattttgatgtttccaaaggcaaatagtatcaatagaacctgcaataccattagaaacatatttacgttcaaagttgatgtagttcatttttattctccaagatgtttaattgcggtacaggtatataatatcatatcctgtaccaaagtaaacaattattttactactttccagtgctgcatgtcaagtttaccaacttttttcatcttctcaattaagcgttcggcgcgttggcgagctgtaacataataccattcacccaattcattttgttcaatttttccaacgattactgtgttcaattcataaatccaaccagtaaagaaattatgaacttgaattgtaaaggtgaaatctgttcccataccttctgttgtttctacttcaataatatcaccttcaactgccattaagaaccacatagtttcatcatatttaccgttgaagcatttagttttaactgcagcgttcagattaatcgttttcattttattctcctttgtttgtgtaagataatactatcacaaaggaaccatgctgtaaacaactttgtgcaatctttggaaaataaaaaaggactcccgaaggagtcctcaacttatgctttctgcttaccaaaacgagaagcatcatctcgaagaaccgcacgtgctcggcgcatgatcttctcaacagtttgattgatacgagagttcgacccacgcttgtaaccagcgcgtttagaatcaccaactttcttttcaactgctttctttgctttagcttgttttgccattataaattctcttttaaatgaaaatgcaggacttattggcattgcctgcgcaagccctcaaggggaacataggtttttgaatatttaacgaccaggataaccataaacccgtcatcattcacattcaagaggtacaccgtaaaactgccggggtcttaaaactataatgattcgcaaatcattaatcagacagttcgacggctcctcgattttagctcacactaaggcagtgaatctccaataaattacttcagtgttaccacaaagtgacgaactgcttttcgtgcagcagaagccagtggcttagcatatttaagttcatctttttcctgaagctcagcagctaatgcagtttgagcaggattcagatgtttgaaataacgcaggatttcaagagcttcggcttcaacatcaatagatgcgccatagttttcgtgaccattattccatgcgtttcgttgcagttcaagagcgtgttgtaattgtttaatcatttaaaaattctcgttagagattaaaactcggtagtcacgttcttctgaatttcatcttctttcgacagatctctcagttgtagactaccacatagaattgttcggttaacttattattccgacacccaattcatattattatttatatcacttataaagacacggaatagctttatagtgacaggtaacgaatttttgtttaatttcttttggctgcttaagacccagagctacaaaaggatgcggaacatttcgaatttgaccaactggaagagaagtcaaatcgccaacttcgcagaaaccttcaggaacatcaggaccgacagagtgaactacacacagttcaggaacttcaccttgaacacgtttaccgataataagtcctgattctgtaacttcttcatcaccggcttgtgcaggttcagaaactaaaataacatattcaccgacagcacgaattggtagctgttgtacttcagacatcgtttttcctttttgttaacagatgaattaataataacaaataattcttaaagcatttatttaccaataaattggagcaaatgctcaactttcataccattaacggaaatcaatttgccagtttgcatggttggcataaagtccgcgtcgcgagtacctttcataacacgaatagtaccgtcagacttttcaaaaactacgtttgaaacacccatggacaatttagttttcaaaatttcacgaattgctactttttgttcagtcgtcagtttcatttatttacctattacagttttaatatgagttgttccacgttctttaagagtggaaagtaatttttggcatttttctaaatcagatttccaactatatggtctatcaatacaaacccattctgacttataatactgcttccatttagagaaaaaatatttcttatactctacagcaaatgaaatattctcattagaataagaactaattgctgtgagctgtaccaaacgaaatttcattattcaccacagaattcgttgatattttcccagtttaacttattcaagtttttcttaggaacattaaacacttcaatacctgcatttcgcagaatatcatcccagccaggtttatttttatcgtatgtttcgcaataaaccagttttttaattccagactgagctatcgcttttgcgcaatccggacaaggagaaagtgttacatacatagtagcaccttcaattgaagaaccatttcgtgcagcaaacaaaatcgcatttagttcagcatgaatttcatttttagatgaccattccgagtgagcactacgatgttctttcgccaagacaaagcgatcagttgaaccaaatgatacacattcaggcttatgaccttgaatgatagtatgtttaggtttattcagcaaccaaccttgctcagcagcataatcacaacagttcacaccccctgcaggtgaaccattatacccagtagaaataatacgtccattcttttcaattactgctcctaccttccaggagcaacattttgattcttgtgatactaaatatgcaatttgaagtactgtactcgctttcatttcataatcaccagataagcagatttagcagtttcaacacgataaatttcgtgacgaagtttagttatacttttaataacagaactaattatattctgcccatctttaaagcggtttttcttatcaataaaaattgcgccaaccatctttttgtgaagctcaaccggatacttcgtcacaataatagcatcatacacagaaggatgaatactattcaccagagtatcattcattaaagttattctaatgaactttgctgtttcagagtcaagcgctctatgatcgccagtatcattttcaagacaattatcaattatatcagttaaattcatcatagtacgccatacaccctttgtgcttcaactaatccatcaaaatccaatttgagatgtgttatttggtcaccatcacctggattcacaattactaatactgaacgaggagtttcggtaataacacgaaccgacgtttcaggaaatcgttcagaaaccttatttaccaattcttgagcaaatagtttaactttttcttggaattctttaacagtaattggtttttcacttagcatgttgatcccagctccttactttcaatgtttttaactaatttgacagaaactaattcggcatcttgggtaatcattaccgggccttcttcatactcttcaagatattctagagctttctttttagcttcttccttcgtatcagtttgagcatagatataaaacatgcaaccagtaatacctactactttccacttaatttctttatcagttttaatttcaaatttactgacagaatcatctttttgaacttcttcgaaaaaagaatattctaacatataagcaattgaaaataacgggctaactttataggattctcccattacatcaacagctttataccaacggtcatcaatttcgcgtttaatgctaataacatttttcgcaggatctatttttactttaaatgaattttccccaataaattgagcaattcgtttattagccccacaggtttcattaaaaatatctttatatccagctttaaaacgataaaccttatcttcttcaaaccattcgctcatttcaatttcctcatttattttggtagagctataatatcacaactctaccgtaaagtaaactgttaaattgctttgaattctgatgtctgtgattcaaagcgaatatcgcctttgatgactagctcagcatcaagaccaaatacgacaatgatatgcgcggaacccggatacagcgtaattgcaatagaatccacctggtctggaagcaaagtgttcaatacatgagtcacttgagcatgaattcgaagctcggctgcgttatcaagcttttcaaacatattattagcgataatttgactaaacactacttctacgattttagaataagtcggaaacatattcaccccacataattttcttcaagccaattaataacatccaacgcattatcaaaagttgaaccatctactatgtcttctgtttcataatcaagaatatctaagtctattcttccatcaacaataggccataaacaaaatagatatttcttttctttttcaattttatcacaaagttgataaatcttttctatgttattcataagttttccatggtaaaggcagtttagttttctttactgttagttcaacatcaggattcttttctcttaatttaatgcattcctcccaagctctgatttcactagtgaatacacaaaattgcccattactagtaccaactaaaccactatttacaataacaatagaccaagtttcatgatgccacgccattaaaaatctcccgaagcaacttgccagcattcaacaccgatacgacgccacatttcaactacttgagttcggtcatcaatagctaatttcacatcaaaatgcggtgcgatgtgtttccagaaaatttcttctttaactacatcatctttacgggtatcgccttgttcgcgttgacactgcatgactaatggaacgccagcaatatcctcaacccatttacgggtcatacgataatatttcgttgggtcttcttcggttccactttcacggcctgaaacgactacgatataatatccttgcttatcgtacatcttagctagttcaataaccataggattgacaacatcagtatcacatttttcaaggtcataaggaccgcgaccattcatttttgctaatgtgccatcaacatcaaaaataactgcttttggtttaccaggagtccctttatataccggaagaccgagatactttcgcatgtttttatacattgagcgtaaaacatcaattggtactgctttagttccacgttttgagttacgtttaaccaattcagtccaaggaacatcaaacactttatattcaactttccagccgtattctttggcaaaagtttcccatgccaggcgacgttcgggattcaggttagtatctgaaatgattactcccttaacagaatcaccgccgtacaaaatacttttagctgtatcaaattgcataccagttacgataccttctttctttttggtatacttatactcgtcacgttcttcatgacccatgatggattgacgataatcatcacgattgatattataaaacccaggatttttagcaataaattcacgagcccaagtgctcttacctgaaccaggacatccaacagtcaaaataatctttttcatcatttaattcctaagaaaacttcaagaatacgaatattatgctcacgccgccctttatataattcagctgttgattgattcaccgatttgctctgaacattagatgaaataaattttatcatgtgatttttaagctgatacatgtcaagcccacgggcttttgcttcttttcgtaaagctttaccagcgtcatctaaagctttcgcagggtcttcatcatttaatactaccccacggtccaaatccatatatactgcaccattgcatgcatcaatgtaacggtctgaacattcaatataacgttctaatagagttttcatttattatttctcaaccaatgattgaatataatcatgcaggtctttagatgctttaccccacttattttggtattcatttttaagattagcacgagattgagctaataaaacatcattagttggaggtaaagattctaaccgctgaatctggcgtccgtaaatcattgcagccatctcggattcataaatcaaccctttgagatgttcaaattgatgccatgaaatcatttacatttatcctcttttaactcttgacgataataacatatcatagttttctggtcatgtatatatcgttttacatcattaagccaaatacgaaattcctgggaatcttcgaatggcataccgacccaagctttaccatcaataactttaacttgccaggatagtttagcttcatcatatgactttatttgtactggccaattaggatgaactgtttctttctttacttctagaggctttgtcgaacaaccaactagaagaccaatagataatattactgctgatagtttaatcatttagaaaggtcctggatgtcttctgcgaacttgttgaaggagttgttgatttgtttttcaaccaatcctggcttatgagccaccacatccgccttctttgcgtctttgcgcagtttttcattttcacgctcaatagcagcaattgcctcacgatttttattattcatcgcatcaatataattatactgaattcgcaaattatttaatgctaaagcgttttcattggccgtttttgtaatttctacaacagacgtttctaatctttcaattttattttttaaaattaaagaagttccgcccaatgcaattacaattaatagcaagcctgctgtcgtattacttaattgcataaagttttaataacctctataatatcgtcttgagaaagaccgttaattaaaatatgatgttcagccggagatttagaaattttaaagcatgcctcaacatcttctgccatatctgatgcgctacgatttggattactaattccaagacgatgttttcccgtcaaaggattaacgatgatatagcatttacagttgttaatatgaacattaggttgagtctgattaatgaacacatcacaatcatatttcgcaagctgattttctaaaaagactttcatctcctcaactgcatcaggaagcatatcacgggcttgctcaagacgacgatttcgatattctttaatggtcgttttccgcttgacttgtttagctaaatctttcttaagatcggtgatatatccaactcgacgatttcctttaaatacagaaatcccatctgtagtatcaccgtatgcttcaacgaccatctcagtagtaataagctgcaaatccatcataaagtcctcatgttatgtcagtaagactactgtaacacaacacgagggacttgtaaacagcttagtatccttctgggataaattttttataatttttcaaaaaattctgttcgatttcacacataaccttctcttgactatcatacccttggtagaggctcataatgataccgaacaggtgatccattccagcacctttagcaacgccttgcgcttccatcgcataagtctttctatctttaccgcaatgcttattgtgacagtcaagaactaaaaacagagctcggtctaagtacttcagataagtcgtctcaaatgcttcaatttttctatatgaatattcatcgtcagcgtacattgctttaagatcatctgatgcaccatcaataatagtcttaaacaatttttctggattatctaatgaactttttgtactatgaagagacacgtaccaatcagacttaattttaaaatgagaaccatctttcatcacagcaacatagccttcgatgttttctgcatttttagcttcttcaacccatttaggactatcgatttcgtatcgttcaactagatacggacgaagaacagcatctttataaatatcatcatatgaaatgtattcgcctgtttcattttcacgaatattcaataaaatgattttcatctcttgataagcaagaacgattctattcgttggagcaacgaattcaaagttagcagtaaatccatcttcggctaattttttaagtctgtcgcgcaaccgatggtgattaatattcatcaaaatcccattagccattaaagcctgctcagatttgattgaaccctttgatttgaacagaatttcatcaccatctaaataagttgataccaaagacccgtcttcttttgttagaatgtaatcaacatcatttaaatcgatattcatcgtgaatggattttcattcaagttaaaaaacttttccataggacgagaagcaattcttactggtttttctccatccatttcaaacataattccacgacattctaatgcgtctggaagtaaccaatcagaataagatgcataattatatgagaaaattctgtaagttcttccagatgcacttacatcatctgagtaaaaaaacttacgctgtgaatccttacatagttccattaaattgttaaaaagttcttgcattgtgtatcctcttttgtgttttgtatatagtaccacactccatgtggaagcatcattttttcttgtgttgaatattccaaggcgggttaaacagtttaatgaatagtggctcctctaggtcaatcgttgcgattgtcattgtacctaactcatttgtcatagaaagattaaaacattggcgggcgtaaaattcaactttgcttccttcctttagcgcagcatgaattaatgcagatttagtagaatcagacgttttgtctttacgattaatagcagttctataatagtttattcttttacgtaaatttttagtttttccaatataaacaagctcatcatttatagcaatagcataaattacgttatacttgtttggaatagataattgttttatacttccgttgtcgtctaattctagctcagtatatttaataaatgaatattctgttgcaatttctttcataataaaatgggccttgcggcccactccttaaaagtattttttaaaactcatcataactttatcatcaacatcattatcaatctgtgcaacaaggtaagatgacaattctacttcttgtggcgcagattgaacattatcagaattaagatattcacgaatccaaggatatggatgtttaaccggagcatcggtaattgggcatggaagaccacactgcttcatacgagatacagttaagtaatcaataaagctccacatgctatttgtatttaatccaggaacatctccatctttaaataaatgaactgcccaatctttttcttggcggttaacttccatgaaaatatcaactgcttcttgttcacactcttgagcaattttaacccattgatcgccatcagtgccaagttgaagttgacgaataatatattgggtgcctttaaggtgaagctgctcatcacgtgcaatgaacttcataatcttggcattaccttccatgatttccatgttcttatggaagttaaaggtaccgttatgttcgattgagctcgctaattctcaacccgttctcttatgaactgctacatattactatgcagaccagactatatcacaatcccagagggattctccccatttcgagtcgcttgaccctacgtccgaagactagtcgttgaaccttgctttgcaattgtcgccgtgccatcgtttatatgttgatggtgataaatctttcttatcacaatatggacaattcaattgaattctatttggatttaatttacatctgtcattatgttttagataaaatccaggacctttaccaatgtgaccgcagaaatcacatgtgatttctttttgtgcaggatgggtcccgttcttaaccatttctaatgtttttgctgatgttcttttcttatggtcttctgacaagaaatgatgtgaaccgtcatttacccgttttgattgagtttctgactgcattttaccaccgcaaaatacatgagtaccttcttttatagctgcaatattgcgttctttaacttttgcaatatgctcagcttgttgaaaattatgtatacctaatgcaactctatttaaattagatttacgctgtatttcaccgtctaaaagatgaaatgtaccattttctatcttagatttaatagaggcaatatttttagctcgtacttcagggatattaaaaatctggatttctctagattttgcggctttagaagctaattcagaaatttcttcaggagaatatttcattctaagctttatagcatgacaagcctggtaatctttttgagctaaatgtatatcataatgttcctgtatagaaaggcacatcaaattatctaaatcattattttcacggttaccgtctttatgatggatttcgtatgttcttccatcagaatctttaggtataggtccgttagcatctatccaaatttttctatagttcaattgtgcatcctcttaaaagtataatcatatttatattatactaattaaaggtgcaagcaaaaccttggctgctagttttcctataaaggactttccagcaattaaaggagttttcgataaacgttaccgtttaaaggcgcattttacgcaaaagatacataaaaacgaatagcttctaatgcattaataacgtgtaaacagaggtaaagagacttcattaaagcacgtttagcttcggcttcttgtttaatagctcgatttaaacgaaaatcagcatcaggagattctttagctagttctacaaattctttagcgttttcccaataacgagttttaatcagaacatcatcataataacgtccaatggattcagcacgtttcataatagcttcatctaatacaatctcatcaaataccttcgatggatcagtataaagatttcgcatgatatgagtatatgaacgactgtgaatagtttcactaaaagtccatgtagcaacccatgtatcaagacttgggtctgaaattaatgacataagtacagcagacggcgcacgaccctgaatgctatctaaaagtgattgatacttcaggttgttagtaaaaatattttgctggtactgaggaagcttattaaactgtgcagcatccatcatcaagtttacttcttcaggacgccagaaaaatgataattgcttttcggttaaatcttcaaaaactttatgacgttgaatatcataacgcgcaataccaagacctgaaccaaaaaacataggttcttttaaaacatcaactggatttgtattaaaaactgtgctcataaattttccgcttagttaatagttggtgactcgtccgtgagtcaaattatatcataatttacaggatgaacaatcttcagcttttggagtttctatttcataatcatcagtaccagaaccatcgcgggtattatgataatagaaattttttccgccaaaataccaaaaatacaaaaggtcatcaatcattattgacattggaaccttgcctttagggaagatttgggggtcatagtatgtattcgccgaagctgattgacaaacccatttcagcataatagctacctgcgtaagataaggtttattacctttcttagctaatttccatgtatagtcgtaaaggtctatgttatgctcaatattgggcacgacttgattaaaggaaccctcttttgattctttaacagagactggtccacgtggaggctcgataccgtttgtactgttagaaacttgggaagatgactcacatggcataagtgctgataatgtgctattacggatgccaaagagcttaaggtcttcccgcagcgccgaccagtcacaaacgtattttggagctgcgatttggtcaatctttttattgtaccagtcgataggtaattcgcctcgagaccaacgagtgtctgaataatattcgcaaggtcctttttctttggcgagcttaatggatgctttaatgagtccatactgtaatctctcaaatagttcatgtgttaaatcattagcatcttcataagaagcaaagttacttgccagccaagctgcatagttggtaacacctacaccgaggttacgacgctttttagctttttctgcttcaggaactggatatccttggtaatccaacagattatcaagagcacgaacttgaacttctgccaattcattaattttatcttggtcttgccaatcgaagttatctaacacgaatgcagataacgtgcacaatccaatttcagcatcaggactattcacatcatttgttggaatagcaatttcacaacacaagttactctgacgaataggtgccttttcacgaataaacggagtatagttattcgtattatcaatgaactgtacataaatccttgctgttcctgagcgttcagtcatgagcaattcaaacagttcacgggctttaatacgctttttacgaatattagggtctttttctgcagcttcatataattcacggaaacggtcttggtctttaaaataagaataataaagttcgccacccatttcatgcgggctgaacaaagtaatgtaatcattctttccgaatcgttccatcatcaaatcattcagctggacgccataatccatatgacggatacggttttcttctacacctttgttatttttcaaaacgagaagattttcaacttccaaatgccaaataggataataagcagtagcagcgccgccacgaattccaccctgtgagcatgatttaacagcagtctgaaaatgtttccaaaaaggaataacgccagtatggcgtacttcacctgtgccaatcttagaaccttcggcacgaatcataccaacgttaataccaattccagcgcgtttggagatatattcaacaattgaagcggaagccttattgatagactttaatgaatcacctgcctcaataacaacgcatgaactaaactgccgagttggagtacggcaaccagccataataggggttggcagtgaaatctgtcgagtagatactgcttcataaaaacgaataacatgttttaatctatcaacaggttcatcttgatgcaatgccattccaatagtcataaatgcaaactgtggagtttcataaatttgaccagtggttttatctttaactagatatttttcttttaattgcatcgccccggaataagtaaattccatatcccgttcgtgcttaatttttgattctaaaaatgtaatttcttctgctgaatattttgacaataattcagggtcgtatttaccttcatttacacagtaagaaatatggtcaataaatgaacgtggttcatactgtccataaacatgcttacgaagagcgaacattaaacagcgtgcagctacatattgataatcaggctcttcaactgaaatagaattcgcagcagccttaattacaatggtttgaatgtcatcagttgtcattccatcacggagatatgatttaatattttcatataattcataaggatctacagatgttccttcagctgcccaagataaaactttaataattttttgcgggtcaaagctctgagaaacaccactacttttgataacattaattaattgcataagtcctcaacttgaaaatcgtctttaaacaatcggttaactatatgagctattatatcaccatgacacggctttggtttacatgtgcatcctagcctcattccacgtaaaggctctaaatgtgctttagttatttctccggatttaattcgacgtataaaatcttttttgaataattcaatggcagcctcccggctgccagcatctttaccgacgtaatttccccaaaatgtaccacggtgaatattaacatcaaagtcggatttatatttattcactacctggcatagacggcccgcgcggtgataattcgtcatattgtttttccgttaaaacagtaatatcataataacaatcagaagaagttttaactgtagaaattttattatcaaaatactcacgagtcattttatgagtataatattttttgccataaatgataataggctgatttggtcctggaacttctaactcgcttggattaggaagtgtaaaaagaacgacaccagaagtatctttaaatcgtaaaatcatatatcctcgcaattaaattaaaattataccgccatctttcctttaattggcgggtgagatacatagttgttaagaacaaaatctttaggcctaagtttaagaacatattttaattgttctttagtagaaagatatcggaatttataaggtagaccgcctattaccagctcacaaagctctttaggttcacgcctcaaaatttctttacattgttctacatgattcatatagatatgagtattaccgccagaaaatatcaaatctcccggaataagattacacatcttagctacaatatgaactaacgtagcatatgatgcaatattaaatggaagaccgaggaaaacatctaccgaacgttgataccactgcaaatccaaatagccattacgcacattaaactgatagaacatatgacaaggcggtaatgccatatatttaagttcagctggattccatgctgaaacaatttgacgcctatcatttggcaattttttaatacgatcaacaacttctataatttggtctacaccgccaaaatcgcgccattgttttccataaattggaccaagttcaccgctatggtatcctaaatcttttgcttgattttcgtaattttcatcccagactgttttgccttgaattaatgaatcatgttgaattaatcgcaaatcattgacatttgtacttcccgataaaaaccatattagctcagcaatgcaagctttccaggcgagcttcttagttgttacggcaggaaaacctttagttaaatcccagcgtaatttagtaccgaacaaagcaattgttcctgtgcctgttcggtcatcagtttcatagccattttcaaaaatgtctttaattaaatcttggtattgtttcatttagcaccttatataaattataatacattttatgaagctaataatcaatacggtttagcatcaaattttctttcaatttcaggcgtgaaatataattctttaccacgtttggaaaaacgaccaataatatgataattattctcatcaaacgtgatattgccaatatccatagctttcaaccaaatatcgatatttctatctagttttatatcaaaattccaatacggagaactattaccaaaaatactacaagcggattcagtgaaacaactgctataaatcttgtctttaggaactactaattgatagacgcctttaataaactgaggaccctgccattttggttgtttcgcgtctttttctaatagaatagggtaataattaaaattcatattttccgccacgtgttatttcatttatatactgattccgtaagggttgttacttcatctattttataccaatgcgtttcaaccatttcacgcttgcttatatcatcaagaaaacttgcatctaattgaaccgttgaattaacacgatgccttttaacgatgcgagaaacaactacttcatctgcataaggtaatgcagcatataacagagcgggtccgccaattacactgatgcgattttcgttgtcatcgataaacgttttaaaatttgtgttaggactggataattggatgcggccaccggctaataaagtaacatactcatcccaggtaatataaaaatgagccaaatcgccatctttagtttcaggataggcgcgtttaatatcacataccaccacatgactacgaccaggaagtaatgtaggcaatgactggaacgttttagcacccataatcataatcgtgccttcagtacgagctttaaaattctggaggtcctttttaactcgtccccatggaagtccatcacctaaaccgaatgctaattcatcaaagccttcgactgttttagttggagaataagcgaataccaattcaatcattacacaaatcctctttcgataaaccattcagtggctttattagcatcaaagaataattcttcatatgtcttttctttgttttcaaagactgtcacacaaacacgttgacattctccacagtattcttctgacatactcaaagcgtcagaaaacatttcattaaattcatttaaatcaggattatgcaatgcgttaaaaattgcataatcgaattcatcattcataaattcaaatacaaaaatcatattatctcctaatataaaggatcgggaacatatccactggctttaatcattttaattaacgttagcagtcctttattaactgcttgtgagatttcatcaaaaacttcatcactaaaaagttctaacacgcccttctgaacttttaatttacaaccaataatttcgtcatcgcctatagtaaattcgtttccgccaattccaccgaaaaacttaattacgccagttaactgtcttccacgagaatatgggtcgtgtgataaagtaatatgagtcaccccaggtacagttttaaattggcagcgaatgtttacttgggaaattccagttacgtgaatgtcagacataatattttcctcaaacagactttttcacaattttccaatcagctttaaactgttcaacatcagaatggtaaatccagaatcctgcgctttctccatcctcataaagagggcatccatcgcattcatcttcccatcccatatcacgcaaaagacgttcagctttttcaacaagttcagaatctttaccgatgatattaaaataccatttacctctaacttctgaatctttaatgctctgacgttgtaatctcattttattctccttagttgatagggtaatagtatcacactactacccttctgtaaactactttttgaaagtttttcgcaaaagttcaatgatttcatctacattgttttcgtctacaatgcagtgaatttttgttacgccagaaatcttgtcttcgacttcatcttcttcagaagtcgattctttatactcgcggaaacaataaaactcttcttcactaagttcaaaataatcatcacccataccatcatcattatagatttcgccattagcacaaataatttcagttacataatcaaagccatctaaacttgatattgatttaacttcaaaccaaccaccattttcttgaatgatgccgaccatattagcatttgatgaactaatatcaatgaaagatttaatacgatgtggatttaactcatattttttgccaatttccattttgattttcctcattttaataggggcttgatagccccttaataattaatgttcgatcagtcccatgtaaaattctgcgtcttcagaatccatgccgtcacaatactcattagccataaagcgggtgaggtcttcaagaggaccttcaataacgatttgaatactccaaaacttagaatcttgcacgcttgtgatactaagttcaggataacgattacgaataatttcttcaatatattcaaaatcaacgatgtcaatatcaactttagccatattattttcctctttaatcatcagcagtattgccgatagttgtatagtaccataaagctttatgcttgtaaaccgttttgtgaaaaaatttttgaaataaaaaaggggacctctagggtccccaattaattagtaatataatctattaaaggtcattcaaaaggtcatccaggtccgtgtcatcagcactagatgaactgccagagcttgagctcataaaatcatcttcagtttttgttttgaagtcatcaacattaaatgcatccaaatcatcagcaactttatcagctttcttagcggcagtcgctgcggcaccacccatagcagcagttcccataacttgactgaacttagtgctcagttcttcaaacgatttgaatttatctttagaagtcatttcagaaaggtcaaccatttgttcgaacagttctttctggaaagattcatcatcaatgtttggaatcgcagattgattcaggaatttagattcgtcgtagttactaaaaccagaaacttgtttaactttcagtacaaagttagcaccttcccacggacaagttacatcaaccggagtttcacccatttcaacatcaactgcaatcattgcattgattttatcccagattttcttaccgaaacggtatttaaatactttaccttcattttctggagcagctgggtcttttacaacaagaatgttagcccagtaagaagttttacgtttaacaagactgtactctttattgtcagtgttgtacagatcatttttactgatgtactgacatactggacaagaatcgtaatcaccatgggtagatgaacatgtttcaatataccatttaccatttttcttgaaaccgtgatttacaagaattgcgaatggtgcttgttcatcatttttagacggaagaaaacgaattactgcttgaccgttacccgcattatcgagtttcagtttccactcgcctttatcttcagaagaaaaacctttattgccattcagtttagccatttgtgcagcaagttcagcagtagatttacgtttaaacattttatttcctttttaatttaatttaattaacagttggtgctatgacactttacctcatagctggcataattcgcaatactctgggtcttcgagaggtatccaacctgagttgaaatactttaccatcgatttagcagttgtatcagttatatttatattacctttaactcttcgccatccaggagttttaccgtacagattagaggataataataacacataattctcgtaagcaatatgagataatttccaagactctatattagctcgtgatgttttccaaggtctaaaatcgtcacggttcatataattagccaatctcatatgctctctaacttccgggtctttggctggatgagtttcaccactcacaccaaatccaccaccagcatataccagattaaaatagtctggattatctctggcatttacttcaagttggtattttcgttctgcttcaataacatccaagtcatcatcaatttgaattattttaacgctcggtttttgaagcattagcgcattcaaaaatcttttttgtttacatgagctccagtattcctttccggaagagtcatatattattccgttctcaaatgagcaatttaatttactaccgatataatagtatggcggagtcttatttttgacacggtcttcaaatgtaaaccaatatactatattcatatcaatacttgcaagatttcacagtttcaatgaaaacacttttagctttctgtgaatcaatatttaaaatttttctataagcctttaactttatagaataattattccagactaaattatcagtctgttcatcatgtttatcgattatatttaaaaacgaatcaagcaagataaacgtctcaaacgaaattatgttcgattgaagtagtttaaaaatataacttgattgaacttttggattatattcaaaaatttctttaaaagcagaaacttcaacttttttactgaaatagtaaatgttgcgaatatcttcttcaaacttaaatttaatttgcttcaagcgtccgatatattcacgataaaacacaagtgcatcagcgtcagagatatcaccaatccaagcatcttggttagctacaagattgctaataaaaattaaagttaattcttttaatttatacttttctgatagcttttggaaaaaatacttatcccttcgcttttgataagcggcatcagacacccgcatgcaccaattatacttaataacatcatactttccattcatatgttgttttatcattaagtataatttataaactgatttaccatcaatatatctttcaccaccagcaggcatgcggagtttaatcataatagaaaatctaatgtattagttttttcacaacgaacaacagaaggacgtaaaagattttcgtcgatagcttctgactgaattttttcaattatacccgaaggaataaatttagcaaattgagtttcaggaatagaattttcttccaagaatgctgttgtagcttcaagataactcattccaaactcttctaccattttttcaataataaatccattttcttggcggtcaagaagttttgctatttcatccttttctttcttaattgaaagttctttttctgaaagaccggtctcatcgaccggacgaatatcatttagagaaaactgtgtcataaagttcaactacctcttcagtttcagcttcaaacacatcacggttatctttatgatacaaagctaatagacgattaaacatcttaccatcaacgccaagttcatctttggcacgaattcgaatatctttaatcagttcattataaccggaaattttcagtttatgatcagatgcttctttaataaatttagccaagtcttcgccgtggatagcttcatcaaattcaaccatttcttttttagccattattcacctcaaaattcattaatgctattagttaatttagaaagacccgcttttacaaaatatgaataaattttgccacgcggtggtaatttatatgaattatagtaattcacaatgtttgaagcaatattatcaggaatataatcaaaatcaattagaactaaattttctttataacgattatattcagattctgtgagaagcaccttagcttgctcacggtcattagcaatagcttcgacaatagaggttttcattgaaggagttcgttcaccttcaactctcgtaaaccaaaagtcagatcgtactttaactgaagcaacgttatcctttttgtcgcctttaaggattttagtcatacagtcaatttcagctgaaccgcttttaattttaacccatttcttgtgcatcggtgaccattgcttaacatttgggtatttgtgaagttgagtaaagtcaccatccgacgaaatgattaaaatcttatgtccttctaaagagaactttttaacaagaacagcaatatggtcatctgcttcatacttattaatatccataacgatgtatggcatataagctttcagttcatctataactttatgactggattcaaaataaccttcccaatcccaagtagattcttctcgtgcttttccacggtttttcttataataatacgcgaaatcacgacgccaatatccagatttcgcgttatcaatacacagtacaattttagtgtatccaagcgtttttgcttttttgacattaaacttaattgagttcaatatcaaatgacgaaccattgataaattaattttttctttatctgggaagtttacaagagcagttgaaagcgcaatttgactaaagtcaataaagcaaattccttctttataatcttcatccagcatcatttctaaatccatatgaacctcgttcaattagtgagatttctattatatactatccaaatcttaaagtaaacaagtataaatacttattattgaaaacacaataggagcccgggagaatggccgagattaaaagaaagttcagagcagaagatggtctggacgcaggtggcgataaaataatcaacgtagctttagctgatcgtgccgtaggaactgacggtgttaacgttgattacctaattcaagaaaacacagttcaacaatatgatccaactcgtggatatttaaaagattttgtaatcatttatgataaccgcttttgggctgctataaatgatattccaaaaccagcaggagcttttaatagcgtacgatggagagcgttacgtactgatgcaaactggacaactgtttcatcaggaccttatcaattaaaatcgggcgaatcaatttcagttgatactgcagctggtaatgacattacatttactttaccatctactccaattgacggtgatactatcgttctccaagatattggaggaaaacctggagttaatcaagttttaattacagctccggtacaaagcattgtaaattttagaggtcagcaagtacgttcagtactaatgacacatccaaaatcacagatagttttaatttttagtaatcgtctgtggcaaatgtatgtggctgattatagcagagaagcggtagttgtgacgccagcaagtctctaccaggcgcagtcaaacgattttatcgtgcgcagatttacttctgctgcaccgataaatattaaacttccgagatttgctaatcatggcgatattattaatttcgttgatttagataaattaaatcctctttatcacacaattgttactacatatgatgaaacaacttcagtacaagaagttggaactcattccattgaaggccgtacatcgattgacggtttcttgatgtttgatgataatgagaaattatggagattatttgacggggatagtaaagcacgtttacgtgttataacaactaattctaatattcgtccaaacgaagaagttatggtatttggtgcgaataatggaacaactcaaacaattgaacttcagcttccgaccgatatttccattggcgatactgttaaaatttccatgaattacatgagaaaaggccaaacagttaaaatcaaagctgccggtgaagataaaattgcttcttcagttcaattgctgcaattcccaaaacgttcagaatatccacctgaagctgaatgggtaacagttcaagaattagtttttaacggtgaaactaattatgttccagttttggagcttgcttatatagaagattctgatggaaaatattgggttgtacagcaaaacgttccaaccgtagaaagagtagattctttaaatgattctactagagcaagattaggcgtaattgctttagctacacaagctcaagctaatgctgatttagaaaattctccacaaaaagaattggcaattactccagaaacgttagctaaccgtactgctacagaaactcgtagaggtatcgcaagaatagcaactaccgcccaagtgaatcaggatactacattctcttttgctgacgatattatcatcactcctaaaaagctgaatgaaagaactgctacagaaactcgtagaggtgttgctgaaattgctacgcaacaagaaactaatacaggtactgatgatactacgatcatcactcctaaaaagcttcaagctcgtcagggttctgaatcattatctggtattgtaacctttgtatctaccgcaggagctactccagcctctagtcgtgaattaaatggtacaaatgtttacaataaaaacactaataatttagttgtttcgcctaaagctctggatcagtataaagctactccaacacaacaaggcgcagtaattttagcagttgaaagtgaagtaattgctggacaaagccaagaaggatgggcaaatgcggttgtaactccagaaacgttacataaaaagacatcaactgatggaagaattggtttaattgaaattgctacgcaaagcgaagttaatacaggaactgattatactcgcgcagtcactcctaaaactttaaatgaccgtaaagcaactgaaagtttaagtggtatagctgaaattgctacgcaagttgaattcgacgcaggcgtcgacgatactcgtatctctacaccattaaaaattaaaaccagatttaatagtactgatcgtacttctgttgttgctctatctggattagttgaatcaggaactctctgggaccattatacccttaatattcttgaagcaaatgagacacagcgtggtacacttcgtgtggctacacaagttgaatctgctgcaggaatattagataatgttctaataactcctaaaaagcttttaggtactaaatctactgaagcgcaagaaggcgttattaaagttgcatctcaagttgaaactgtagctggaacgtcagcaaatactgctgtatctccaaaaaatttaaaatggattgtacagagtgaacctacttgggcagcaactactctggtaagaggttttgttaaaacttcatctggttcaattacattcgttggtaatgatacagttggttcaacgcagtcattaaacttgtacgagaaaaatagctatgcagtatcgccatatgaattaaaccgtgtattagcaaattatttgcctttaaaggcaaaagctgctgacacgaatttattggatggtctagattcatcccagttcattcgtagggatattgcgcagacggttaatggttcactaaccttaactcaacaaacgaatctgagtgcccctcttgtatcatctagtactgctacgtttggtggatcagtttcggcaaatagtacactaactatttctaatactgatggaacagcaactcgtctgatttttgagaaaggacctcaaactggaacgaacccggctcaaacgatgacagtcagcgtgtgggggaatcaatttagtggggaatcaaacacaacacgttctaccgtatttgaagttagtgatgaaacatcttatcacttttattctcaacgcgataaagatggtaatatagcatttagcattaatggtactgtaatgccaataaatgtgaatgctttaggaacattgaatgcaaatggtgtagcaacatttggtaattcagtcactgcaagtggtgaaattatttctcgaagcgcaaatgctttccgtgctattaacggaaattatggttttattgttcgcaatgacgggtcagtaacgaattttatgcttactgcatcgggcgatcagactggtggatttaatggattacgtccattaactattaataatgcatctggtcaagtaacgattggtgaaagcttaatcattgccaaaggtgctactataaattcaggcggtttaactgttaactcgagaattcgttctcaaggtgttaaaacatctgacttatatacccgtgcgccaacatctgatactgtaggattctggtcaatcgatattaatgattcagccacttataaccagttcccgggttattttgaaatggttgaaaaaactaatgaagtgactgggcttccatacttagaacgtggcgaagaggttaaatctcctggtacattgactcagtttggtaacacactcgattcactttaccaagattggattacttatccaacgactccagaagcacgtaccactcgctggacgcgtacatggcagaaaaccaaaaactcttggtcaagttttgttcaggtatttgatggaggtaaccctcctcagccatctgatatcggtgctttaccatctgataatgctataatggggaatcttactattcgtgatttcttacgaattggtaatgttcgcattattcctgacccagtgaataaaacggttaaatttgaatgggttgaataagaggtattatggaaaaatttatggcagagtttggacaaggatatgtccaaacgccatttttatcggaaagtaattcagtaagatataaaataagtatagcgggttcttgcccgctttctacagcaggaccatatgttaaatttcaggataatcttgtcggaagtcaaacatttagcgcaggtcttcatttaagagtttttgacccttccactggagcattagttgatagtaagtcatatgctttttcgacttcaaatgatactacatcagctgcttttgttagtttcatgaattctttggcgaataacagacttgttgctatattaactagcggaaaggttaattttcctcctgaagtagtatcttggttaagagcagcaggaacgtctgcttttccatctgattctttattgtcaagatttgacgtatcatatgctgccttttatacttcttccaaaggagctattgcattagaacatgttaaactaagtaatagaaaaagcacagatgactatcaaactattttagatgttgtatttgacagtttagaagacgttggagctacgggatttcctaaaagaacatatgaaagcgtggagcaatttatgtcagcagtcggtggaactaataacgaaattgcacgtttaccaacttcatccgcaataagtaaactctctgattataatttaattcctggcgatgttctttatcttaaagcgcagttatacgctgatgcagatttacttgcgcttggaactacaaatatatcaatccgtttttatgatgaatcgaatggatatatttcttcaacacatgctgagtttactggacaagctgggtcatgggaattaaaggaagattatgtagttattccagaaaatgcagtaggatttacgatatatgcacaaagaactgcgcaagcaggtcaaggtggcatgagaaatttaagcttttctgaagtatcaagaaatggcggaatttcaaaacctgctgaatttggcgtcaatggtattcgagttaattatgtctgtgaatctgcttcacctccggatataatggtacttcctacacaagcatcgtctaaaactggtaaagtgtttggacaagaatttagagaagtttaaattgagggagccttcgggttccctttttctttataaatactattaaaataaaggggcatacaatggctgatttaaaagtaggttcaacaactggaggctctgtcatttggcatcaaggaaattttccattgaatccagccggtgacgatgtactctataaatcatttaaaatatattcagaatataataagccacaagctgccgataacgatttcgtttctaaagctaatggcggtacgtatttaaataaagtaatttttaataaaggaatgactgttcctggcgcagggtcaggtgacaacggtatttttgctggtcctggtgataatgccacgtatgatactacaaatatggatattgtttcgtggtatggtattggttttaaatcatcacaaggaacagcaggtagaactgtagtaattaacacacgaaatggagatattagctcaaagggcgtaattgaagcatcgcaaatacgcgcaacttcattatctccagtaaataattatgacctcacgcggaaagattatgtcgatggagcaataaatattgttacagcaaacgcaaactctagggtattacgctctggagatactatgacaggtaacttaaccgcgccaaaccttttttcgcagaatcctgcatctcaaccatcacatgttccacgatttgatcaaattgttattaaggattctgttcaagatttcggctattattaagaggacttatggctactttaaaacaaatacaatttaaaagaagcaaaaccgcaggagcacgtcctgccgcttcagtattagccgaaggtgaattggctataaacttaaaagaccgtgtactttttactaaagatgaccaaggaaatattattgatctgggttttgctaaaggcggtagcattgacgggaatgttattcatataggaaactataatcaaactggtgattatactttaaatggcaccttcactcagacaggtaattttaatttaatcggtattgctcgagtaactcgcgatattattgccgccgggcagattatgaccgaaggcggagaacttattacaaaaagttcaggtacatcacgtgttcgttttttcgatagcaatagccgcgaacgcggaatcatttattcaccggctaatgatggattaactacacaagtacttaatatcagggttcaagactacgccgctggtagcgaaagcacctatgcattttcaggcaatggcttatttacttcacctgaagtatcagcatggaaatctatgtcaactcctcagattttgaccgataaagttattacagatgggaagaagacaggcgattatgacatctattcattagcaaataacactccattggcagaaagcgaaacggctattaaccacctccgtgttatgcgaaatgccgtaggatctggtatattccacgaagttaaagataatgacgggataacctggtacgccggtgacggattggaggcctatctttggtcgtttacctggtccggtggattgaaagcaggccattctgtttctataggtcttccaggtggccctaaaggatattctgaattaggaacagcttcaattgccctcggtgataatgataccggatttaaatggcatcaagatgggtatttccatacagtaaacaacggaacaaaaactttcatttacggtcctgcggaaacacaaagccttagaaaaatggttatgggttattctccggatggtattctcatgacaacgccaccgacagaaaactatgctcttgctactgtcgtaacatatcatgataataatgcgtttggagatggccagactcttttaggttattatcaaggcggtaattatcatcactatttccgcggtaaaggtgtcacaaacattaatactcatggcggtttgttagttactcctggtaatattgacgttattggcggttctgttaatatagatggtagaaataattcttctacactaatgtttagaggcaacacaacaggatacagctcggttgataatatggatattaaagtttggggtaatacgtttgttgatccaagcggaggtatccgtaaaaacattatggaaatttctgatgcaactagctggatgagctatattcaaagacttactactggcgaagtagaaatgaacgttaatggttcatttgaatcatctggtgttactgctggagatagaggagttcacacaacaggtgaaatttcatctggagcggtgaatgcgcttcgcatttggaacgcagattatggtgccattttccgtcgttcagaaaacagtcttcatattattccaactgcctatggtgaaggcaaaaatggcgatatcggtccacttcgtccatttagtatgtctttagatacaggtaaggtcgttattcctgatttagatttaagttatgcttcttttgccgcaaatggttatattaaattcggcggtcatggcgctggcgctggcggttatgatattcagtatgttcaagcagctcctgttttccaggaaattgatgatgatgctataagtaaatattatcctattgttaaacagaagtttttaaacggtaaagctgtttggtctttaggcactgaaattaattccgggacttttgttttacatcatttaaaagaagatggttcacaaggccatacatcaagatttaatgctgacggtacagttaatttccctgataatgttcaggttggcggtggtgaagctactattgctcgaaatggtaatatctggtctgatatttggaaatcgtttacttcagcaggagacactacaaatattcgtgatgcaatagctactcgtgtttctaaagaaggcgatacgatgaccggtaagttgactttatctgctggaaatgatgcccttgttttaactgcaggcgcgggtgcttcatcgcacatccgtagtgatgtaggtggtacaggtaactggtatataggcaaaggcggcggcgataatggtctaggtttttatagttacattacacaaggcggtgtatacataacaaataacggcgaaatatcgctttctcctcaaggtcaaggaacatttaattttaatagagaccgccttcatataaacggtacacaatgggttgcgcatcaggccggcgattggggaaatcaatggcgccaggaagctcccgtatttgtggattttggctacgtcggtaatgatagttattatcctattattaaaggaaaatctgttattacgaatgaaggatacgtatctggtgttgatttcggtatgcgccgtatcactaataactgggcgcaaggtattatccgtgtaggtaatcaggaaaacggttctgacccacaagctatcttcgaattccatcataatggaaacatgtacgttcctgacatggttaaagctggagtaagaatatcagctggtggaggtgaccctgtatggacaggcgcatgtgttgttattggtgataatgataccggattagttcatggtggtgacggccgaatcaatatggttgccaatggtatacatattgcaaactggggcgcaggctatcaatctcatcctgggctttgggattcaaccggtgctttttggacagaagttggaagagctatcgtttctcatgggcatctcgttcaggcaaatgatagttattcaacgtttgtccgtgatgtttatgtccgttctgatattcgcgttaaaaaagaccttgttaaatttgaaaatgcttctcagaagctttctaaaattaacggttacacttatatgcagaagcgaggcctggatgaggaaggtaatcagaaatgggaacctaacgccggtttaattgctcaagaagttcaagctattttaccagaattagttgaaggtgaccctggcggtgaagctttacttcgtttgaactataatggtgtaattggtttaaatacagctgcaatcaatgagcatactgacgaaatcaaggaattgaaatctgaaattgctgaattgaaaacattaattaaatcattattataagaaaaggccttcgggccctggaggtttttatggcggtagtaggaatacctggctggattggaacatcagcagtggctgaaacaggtcagcgatggatgtcggcggcttctagagaattacgtctagggaacccatcttggatgtctcaatttgctggcaggtcccgtgagattattcataccataacagcaaatcataactttaatgggcaatggttccgcgaccgttgctttgaagctggcggtgcgcctattgtattcaatattgtaggcgatatagtatcttacgacagtaacgttccactgttctttatgaatggtgatactcctaatgaatatgttactttgaatattcatggcggggttcatatgtggggaagaggcggaaaaggtggatggactcattctggtggagatggtaatggccaacaaggtgggcattgtattcaaaatgatattggtggacgattaagaattaataacggcggagtaatttgtggcggcggcggcggcggcggcggtatcgcttatcgtcctcactctggtgcaaaatggcaggatattggtggcggtggaggaagaccatttggcccaggaggtggcggtggttattcaggaggtgctgcttcttatgatggcccaggaggcggttataattatggtaatgctcactctggacagggtggtgatgctggtgcaaatggacaaaatgcctggcatgatggcggtaaagtactaaaagtcggggctggcggggctgcaggttatgctgtcatagggtctacgccaacatggcaaaatgttggcgtaatatatggtccaagagtataatttttgaataaatatccttaaaaggagggtctatggcagcacctagaatatcattttcgccctctgatattctgtttggtgttctagatcgcttgttcaaagataacgctaccgggaaagttcttgcttcccgggtagctgtcgtaattcttttgtttataatggcgattgtttggtataggggagatagtttctttgagtactataagcaatcaaagtatgaaacatacagtgaaattattgaaaaggaaagaaatgcacgctttgaatctgtcgccctggaacaactccagatagttcatatatcatctgaggcagactttagtgcggtgtattctttccgccctaaaaacttaaactattttgttgatattatagcatatgaaggaaaattaccttcaacaataagtgaaaaatcacttggaggatatcctgttgataaaactatggatgaatatgcagttcatttaaatggacgtcattattattccaactcaaaatttgcttttttaccgactaaaaagcctactcccgaaataaattacatgtacagttgtccatatttcaatttggataatatctatgctggaacaataaccatgtactggtatagaaatgatcatataagtaatgaccgccttgaatcaatatgtgctcaggcggccagaatattaggaagggctaaataattatttgttcgtatacatttctagatatctatatacaccctcaaaaccctcgttgaattcatcgatgagggttttcttatcttcttgagttaattcagaaacaattttacggaatgaattctgatttaattttctaccttcatgcgttactccaatctcattcagaaatgcaataaaattagcacgattttcaacaatatcttctctggaaaatttaatcaaaatagacgcaacagtaataatttcacgaactgtatcaatgtttttattcattaactataccactcaattagttgactttgttataatatcatcagacgtttgatttgtaaactggtctgtgttattttcttcaaaaattttttctacgaattctttgaacgactcacgttcctgagctacattatgctcgattaccatttcaagattatgactcattcgaaataatcttcaatttcgtaatcatggacataaatcattatagtttttaatacatcatcaatactttttcctggagctggaattacgtaaaaatatcctgcttttgagaggtctttataagttccaatcaagaaatcattattctcgagatgtagttcttcaactaattcattaacaattgagtggtataaatttggtagaaacttatatagcttttctagaatatcaattttgattgtgtattgaaccacggactgagaatcaataatcatagaccttccccttatgtttctgtttgcgattagattctttaaacgctttcttcttatccttatgaacagaagctttattaaaattatgttttgcgactaaattgttcatagtgctgaattacctctcttaaacatttgcatgtgaatgaaaactttttagctacaccacattcaaatatatgttctcttaaatcgcgtgtgtcagtatatcccatctcaacgataaaatgtcttattaaatttttatctttatcattgagagaattaaaataatcggattttgaattaatttccctggccaaattgaataacctttagttgacgttttagttcttttatcatttcttcgttcatcgcaatataaagatcgcgtaaagcaggttttagcattccatttactggagaactaaatgggcacacataatcttttcctacgagctttttagttaattccatgtcacagaactgaaatgccggttcattggcataaattccccaattagttgacatcattttattggcatattctagtgcctggatttgattcttaattccatcaatttgaaactttttaatattcattagtaaaggtcctcagagtaaagttctttttcactaccaccgcgttcaatacgtacttgtccggcgtaagttgcaataatcattgcttcttcacgtgtccaataattactatattggtcaataaacccttggtcatcatcacaaacttgttgagtaactaattgaggtttaactacatctaaaacttctgccatatctttagaataatgacgagcacccggaataacaagagttcgtccatcttttaatttaaaacggttggctgcgcaaacaattcgtcgttgatatttttggttttcgtcccaatacgcagtctgccaacagatttcaggaacttcatctaaaacattttgttcggtgtattcaccactgtaagaagctaatttagcagccaaactttctggagtctcacgtgacaaagctttatctaacagagttaaacgttctttaaaagttttcatttaaaccatcctttaatacgctgccacaaagttttctgttgagctttgttaacaccaattgagcgaataactggctgagattcctggaattctttataatcagcaaggtaaatttcgtaagctgcatctgtaaatgaacttatcgctgccataaaattattgcgaatacctactggagcatctttactttcacgaataatcatgtatttaccagtcttaatctttacaatagttccaagataagctccgtggtaccagatgtcccacccctcttgagtgggttctgcacaacgacgaagttcattaacaatttctaacttgttcattatttattcctcacagttcagatgctacggtgattactgcttcaatgttttctgccgagcgtttaatgtcaagatacacattaccatttttagcgattttacatgacattccgatatcagtaaatttctgaatatgatgttccatcattttgtatccaaaaattcgcatatttccattgttgttaatttcaaaattgcgaattccatgagtgcgtttttctaaaatagcaagatagttactgcggtaagtttcaacctttttaagaacaaatccattttcatctaaaagttttaacatgaagtctttatcttcttccatatcggaagtaatctcacgagctttacgagttgctcgttttttcagcagttcaggagcattttcctgtgcatataaagttgctgcatttgaaataatatcctgagcttcaccagtaatgattaatccatcaccagatttctctaccaggccttttttaatcaataccccaatattactattaactactgcgttacctaaatctggatgcacctcacgaacttctgcagctgtaatgaaatctttcttagcaatggtaattaaaatcgcagcagttttttcattcagaacatcgttagaagctttgatgatgtaagttactttagacattttctaatctccgtaattctgtatcagtagttgatagttgtatagtaccacagtatgctttggttgtaaaccgttttgtgaaaaaaatttttgaaataaaaaagggagagcctcggctctccctaaaattactgcatgactgtgataactgtcatgataacacgttgaattccgaacgcaagaagacctcctgctacggctggaacaacacctaaacccgccagtaaaatgctaccagatactaatgcagcgcttgtaataccaatgaatggactcatttgatttcctctaaatctttggtgtattctgtaactacatcagtagttttccaatattcgttttcttctttcttagctttagcttcttcagcaagtttctttgcttcatcggaagtcatatgaaaaatattcattccgactagtttatcaacataagaagaatacatatcaattttagaaagttcttcggtcagttctttgcgagttttaccttgtacaacaatttcacctgaaattactttcttaatgaaatgtgccttggcaaaagctaaacgaaatgctgattcagtttctttgattttgttatcaattcgtttttggacataagttttacgaacttcaacgaagtctttgattaaatcaactacattatcgtaaacttgcagctttcctttctcattaataacggtgatattctgggaacgacgctcaatcaacccgaagtctttcataatttttgcatgacgttcttcttcgttatcactcaaagagtattctttacggaatttaactttaaagccaaaaccatgctcaccgcaagcatcatcccacgtaatgaaacctttatcttcaagcgggtctaagattttactcacgtaagtttcacgatcatacttatatggaatctcagtgatatgcatttgagttcgtgaagtaaacttgtatgttccacgaatttcatattgaccgtcaatttcaacgacttcaccacgaaattctgggaattctaccttaggtttagttactttctttccttgaagagcttgcagtacagctttcttgacagaagaaacgctatgaggaagaatgtaagttgcataaccagttgcaataccggaaacaccgttaagaagaacagtaggaataataggcaaatagaaagcaggcggaatgtgttctttatcttgatgtaccggagcatattcagtatctttatatacgttatagaaatttttacttacacgagcaaaaatataacgacttgccgctgctttttgaacggtacgagaaccaaagtttccttgaccatctaacaaaggaaagttattattccaagtattagccatcaaagccccagcatcttgtgcagaattttcaccatgatgatatccaaggtctgctacaccacctgcaatagatgcgagtttgtgaaacttatctttatttcctcgtgccaaatcaagagctcgagcaataacaaatcgttgaactggcttaaatccatcaatcatatttgggatagcacgattttcaaccgtgtacatagcataagccaatgcttcattatcaatgatactttttaaatcgcgattattcagttgcataaatttaccatactagtgaatgtagtgccataataacatcagaaatgaaaagcacgacttgaattaatccgaacattactccataatatagtgctaccaataaagtagcaagggctaatgaatagcccaagattttcttaatcattagtagataacaacacaaatgttaaatatgcacacataccctgggctaaagcttgtgaaaacacactgctagcatcgatacagatagttaaaacacatgctactatccaacaaataaatgaaataactcctaataattttgcgatattcatattttcctcactggcgtccgaagacgcctttggttttaagattgttacgatagaactgcatcacatgttcgttgtggaaattactcattaatatgcctgcaaaacaaatttaaagttatcagctaacatacggttcatttcttcaagtgtttgatactcagaatgatgattacgagtaaacgccaaagctaactgaccttttccaaatcctgtcgtcaaaggtttcatcttagaagcaggaagataaaatactgtgtatggaacattattatttgcaatagtacgcgcaagctgagaccgacgctgacgaatatgacttagaactgcactgaacccttgcttagaacgctgattacctacataaaatcgtgcagatacgcatggactatcaaatggaccaccaaatttgctcactaaaaagtaaaatccagggttagacaaaatgtctttatgcggagttccaaaaacccattcaccgcccttgattgtaccaataacagtagcacctgcattattcagatcagtaacagtcatgtatttcatattaatttcctctaattattttctactccaaggccgcatgaatacacacggccgataaattaatcgtcgcagtcgacgctcaattcccagaactcttctacagtataagtttcagtatcattttcaatacagaaacgttcattactgttatttgctaaagtagcattaactgtcattttatcgctagtgctcttaagaggtgaaatacgaattaactgatcaccactatccaagcaaaaaatttcgccaacttttacatctttaaaaattttcataattcacctcagggagtataaaatccaaatgcagttgttgaccatcccatccaatacggaaaatttgcaccgacgtaaaacatgaaaatataaaaccaaatgcttagtaaattcattattttacaccgttccaaattgtttcaaccacagattttaagccattttgatgaatgtccattccgacaactgccatcaaataaattccaactacaactgaacctaaggcaaaaatcagcatgaaaatgaataaagccggaaaaatattatcgaaaaaccattcaataaatgtaaaagcactgcgtttacgcttcatattttcctcacataaatccaaagtaagcgtttaatacatcaatcattaaaacgattgggaatatactcaaaactactagtattataactacattccatatagctttaacaatctttttcattttctgttcctccgtagttgatagggtaataataccacagaggaacagtcttgtaaacaactttttttaaaaatattcgtaataaatgtgaataccaatcaccactgccgaaacttgcgcaacccaccatgcacaagcaataagtacagaattcaaaattttcataataacctcattacaaaagtaaatgttaaacaaattagtggaatactaattaaccaaacaaaacaccaccataatgaactcatagttcaatctcaatgatttccaggtgtttttgttttattgcctttttaacacaatcatggactaaatatgaccatgaatcattatattctccattaactaatcgttggagatcttcacgtgatgataagtaaggttgatctgattcccattttgataaaaatactgcagtaaaaatatctccttcacctgtagttgaagtcgtaaatgcaataaattcaccggtaattttatgtttagcgtaataaaatttaaatttcatttttactcctccgtagctgatagttgtatagtaccacggtccttgtggtatgtaaactgttttgtgaaaattttttttttaaatggaaagataccatccgttgtagttgctttttcttacaactttacgaaggtcttctctgtcaccgatgaacttcggagtgtactggatgacacctggatgaatttctttagtgttgaatataattatacagtcagcgacctgatgattcagaatgggccctagatttattccagaaccatatggatactctccgctgcatcctgttgtaaccgaaatccaacgtgagtcagtttgatgtgtcttaacttctacacgaagcccacagtattttggatgcgccaatacatcccatgcatatgtgtacggatcatcgacatcttcttgacctttgttaacatacccgcttagccaatctgctacaaaaaattctgcgtacacagcgatacggcatctttcgataacttctgtcttatcctgattaggattttgttttaaagagtatcttgctgtatcagcaattttgaccttcatttcactagttaagtcactgttcgatagggtaaatgtcggaatctgaaatagtctctgtaaacccggattcgttttctgcatttagactttcctttttaccgctgagataagcgttatatactttaagagtgccgtaataaattcggtcattttcatctaaagactcgcggtcaagttcatcaagctcctttttatccatgactataacatcattacagtaaagaaacccaagtttttcgtgaccaaactcaaatttattacagtacacaatattagcgtgatgatttccgtgcagtttaatctcttttatgtcggaatcaccgatattcatacaataaatcataatttttccttaaaacaaaagggccgaagccctttattttacttgaattgtgcaattcttttctctagacattcagcataagatttcattgagatgaactgcgaaagtagcagttcttgctcaactgcgttaactgttagaaactttgcgctttctaaaaatttactcagtgcattaattttgagcattaattgatcgtattcttcttttactcgtgcttgataacctaacataattttccttagttaagggccgaagcccttatttaaattgttcagtaacgtcttcaactacttcgtattggcaggtacgcattttagcatcgttgtaatcaatcggaattgatactacatcacgcggatgcactttaacttttacaactcgactggttgaactgccaaagtgacgaatataagatttagaacacgcatgcagaccacgagaacaagtttgtgtatcatcgtcattcacacgagtacgtggcattttaactactttaccgggactgttatcaaaagtatttgaatgacagtcaaagtaattgctgcgaactactttccaagcatagaagtaaccatcttctgtaatttcaatatcgtttgctaccaagaaatcaaagagtcgagataccgctttttggcttgggttttccaacagattttccaagaacggaaaataaaattcaaagttttcgcctttttccatcgaatcgagaatacgatcaactaaaccagaccgcaattcaatattttgatagaacaagcttccaccttcaattcgaacatcaccggaaatatatttttcaacagcacgacgaacattaattttttgtgccgcttcttccaatttatctgcaacaagcagattaagaatttcctggaagtttgaatgagtattaggagttgcgttataagttacaccgtcaacagtaattgaaatgaattttttagatgcattccaaataatgtcagatttagcaactggagcaataactgcatcgctattaactttaactgtaatatcaccactaatagtaactttagagcgctcagcttcttcagcatttttcaaaacacggcggattgtgtcaaccgatacaccttgccaatcagccaattcctgttgggtgtaattaccacttgaatacagtttgacaatttcagattgttcgtttttggtcaggcatttaatattgtacataattttccttattaggccgcaagggccttcatagttttagcgacttgggaaacttcatcatcacttaaagagttgcgataaccgatgaagtcggaaacaatacggaatttcttggtaaactcagcaaccattttatcactgttttttgaagcattatttgataatacatcaaaaagattagttactgtccagatgtcatgaccgatggtatcttttccaccattgaaatatacgccccgtaatgaactaactatattagcgagtcgtgtatattcttcagaaacttcatctgtactgaagtacttcatcataaaatctagttcaggatacttgataattttatcaatatatcgttgagctgaacttgaataacctacgtacttatcataatctacatcatcaaaagcatctacatataaatcacgcagagtttcaaaaatacattggcactgaccgagttcttttacctttttctgcaaaagcggacgaataacataaaattcattaatgccaataagattagccatacgaatcaaaatactcgtagacggattacagagcgatgtagtaccatccatagagaaaatatcagaacgatgcatgtatgctacataaccagtaatttcatctgcttctgatgtgagtgtaaacagttcctctttttcccagcgcccgtctttaatttcaaacttaaatgcagtggcagctttaggacgaggagctttacttttaactgccttcggaatataacttttaactaaagcttcaatttctgacaaataatgaatgttaacttcatcactttcaaacattgccataatatcagggagtaaatcaatctgcgattctacttccggattaataaacagaagacgctcgttgtgatgaatatttaaagtgttattaaattctttatcatctaatgcatgcgctaatccacggacaatattaacacgatttttaatattatcaataacgatattaatttttgttgtattaataccgaacagacgataacttgatgcaacggctgaagtttcatgactttgcttaatgcgtttcagtcgagggtcaagatttacttcatacacaactcctgcattgcataacttactgtcaggttcaaacatgctttgcatcttcttatatgacagatttttagtcgtaaatttgactgaattactaatcatataatctcgagcagaatatcccatcttcatcaattcgcggtatgtatgacgaggagatgtagattctttaaatcgttttacatcttcattgaatgccttctcactaagctctttaacacgctcaataatatttttacgagtacgatcatctagtgaaagagcttcgcgtgatggagcaatatcaagtgaacccattggaaacttaatgtaattcacttcattacggatgcttaaccagttacggtctctaataacaccatcgataggataaacaatacccccgtagatagcatacaatccaccacgatctggccagtatctttctggatttacgccgtaatagtcatcaaaatccggaaaataatcaatttcgcggtcaagaccattaatgatagctaaatctttgaatggtcgcatgatataagaaacttcataagcaaagtttctaaagtctttttcttcaactggaactacgatttcaataccagttttatcatctggacccatttcttttacaaatgtaggtttaatttgcggaccatcaccatccatgtaagctacataaccacgaatttcgcctttatgatatgaagtaatactaaatgtatcagtataactaaacggagatttagaacctaaaccaaatccaccaatgaaatcgttagattcagccttagatgaactaaagtatgaattatacaacccaggagaattatcatcaccttgaatatcaaaatcgctcatacctggaccaaaatctcgacaaacaaatcgcggatctaatcgtcctggaacttgaatgataaatttttcaggatttccattgagagcatgggcatcaatcatgttggtaatcaattcacggactactgcgcgaatcttgtttgtatacaaatcagatgacagaattttgaatactttaggagatgctgtgatgctaaatgcttttgatttagaaccattaccaagaattgtttctttttcagtggtgataatcataatttcctcattaattcatattgcgtttaataacttcagcaacttctagtagttcatctttagttgcggtgtcggattgaattttatctctaatatccttaaagcggtttttaaactcttcggcttctcccatatcgaaaaagcgttgaatgattctatattctcgatgaactgctttatcaaaaagttctaaatttactttatatgatttcatttcaatatcctcatttgcccaattaattataccacatccttgtggtaaagtaaactactggctcatccattctttacgaaggtcagcattatctcccatgagcatttcaaaaagctctttccaattctcaggaagtttaacaacatcatatactgggttttgaatcatctcacgatattcagatttttccaaagagccaagtcccttaatataacggatgctatgtttaggtagagcatctttggcactctcatattcagcgactgtataaaaccattcttgttttttaccgacctgagcgatgattacaggagttttgacgaagcgaattcttccttgttcaaacagttctggccaattactaaaaaatccgagcagagaaggataaatgcttcctagaccatcgtgatcagcatcggtcataatagcaatattatgataattcaagttttcagctttttcaccaagaactaatccagtgattgcgcaaatatcaaacagttctttgtttttaagcatatcagcatatgacataccccaactgttgagaactttaccacgcaatggataaccaccatgaagttctttatcacgaacatcaataagatatccgatagcagaatcgccctcagtcaagaaaagagtagtatcagcatctttaccacaaagattcgctttaatatgtttatgaaccttagctttagaggcctttttagctgctttagtttctgctgctttttctgccgccaatttacgagccaaggcagcttcaataattggcattaaaattgcttcattacttaaaatagcacgtgaaatctttttagcatcaagttgaatatgactacgaatttcaccaaaaggagaagtcaaacgctctttagtctgagaatcaaatcgcatgtttttcatatcacgaacaaacatgacgatagtcaaacattctttaacacgtgctttagttacatcaattttgaacttacgtttgatttgtggaataaggtcttcacaaatatcatccataacgcagtcaatgtgatggccgccattcttagtatgaatgttattaacgtatgttaattgacgaaaaccatccggtgaacggccaaccgcaatagaacaattttcttgttcttgaacaatagcatgctcatcatattggcgtgcatatttcttaaaattaccctgaacctttttaccattaaaggtaaattgaatatcaggataaactactgcaagtgtctggagacgatccagtgtaatgtcaagataaacttgagatagctcattagtttcaaatgacataaaatcaggaatgaaagtaacgcgagttcctttccattttccaggaatatcttcccatgatttattttccatgccatttgaacaacgaactacaatattattttgaccgtcgccagtttcaccaacaaacataacagaaaaaatgttagttaaactagaaccaacaccgttcataccgccagtgacgcgttctttatcatcaccaaagttaccacctgcttttggaatagtccaggcagcaacgggaccaggaatttcttcaccggtaggtgttttaaccatcgcttgtggaataccgcgaccgttatcttcaactgttacttgattgtttttaatagtaacattaattttattcgcgaatttaaacttagtacgaataccttcatctactgagttatcgataatttcatcaataagcttaacaagaccaggtacatactgaacactttcccatttaccaaacagaaagcgctcatgcatttcattagcggaagagccaatgtacatgccgctacgctttttgatatgttcaatatcgctcagaattttaatttcattcttaatcatcacttatcctcgtttggtttcgggaatattatactccggtaatcataaagctaaaggcccgaaggccttttatttaaaacggatagtcgaatccttgaagaatagaccagaacatacggttccttctactttctgcccggtaggtccaatagcacgaaatccagtatgttggaaatcattttcagagcaaccgaaccaattgtatccagtgatttcaatattagtaaacccacttgaagacaaaactttggttgcattatcagcatcagtacatcctgctaaagacactgctaatactaatgctgcgatagaacgattaatatatttcataatttcactcaaatttaatggcttgaagaagactaataattctcaagcgacttctttcatctttaaccgtaaatgaaagagggtcaccagatttcatagtgatagtgcattcaaaatcaaaatcttcgggaacttcttcgaagaagtcaaattcttcatcatatattagaacattactctgaaaactgtgaagaatttttccatcatttccagatgctgtactaatcattgtaacgttattacctttcatatcttcaacgataaattcgcttgtagatattacggcattaatagaaccattcctataaatagcagaaaatagatatttcttttcttcaccttcgcgaatgcgatatttcttaccaattttaaacataattaccctttaagtaagtcgtaaaaaccaccattcacatgcttaggagcggaaactaaccgaatagcaatccgatgacaatcaggacatacatcagtatccctttcagaaattttcttgattttttcgtattcttttgcacagtctttagattgacatttataatcataaagcggcataattattccttaaagtgagctttcaacatctgatacaaagaccacgcctgttcattattttcaatagtaactttcatgacaggaaattctgtgaaatcttctatttgttcttgctcttcctgctcttgctcttcagatgcctgatatggattttcaacttcatcaaagaactcagcttcgttagtagaaagccagataaagttttcatcaaggatatcaccatgttttgcatatccaattgtgccagtaaatgacataattttagtaggacgaccaagatggtcagcatctaaaattttaaaaggatgcatacctaaacggcgcgcatagattccgttatcagtgtggtctttaataaaattttcttgagcttgtttatttttaaattgataccatttattaacttcaaatctaatagccattaataaatttccttccagtaagttgtaccgtcttcagtgatttcacggaatacaccgtaaattggttgtttatcaccaaccttttcatacacataaaccgaagtcaagtgagtaaacttagcagtgtgttccttttgaactactaccaaatctggatcgaataatacatcttcaaattcgtcgttagtgcatttctgaacagttttacgtttcattacaatttcctcattaattgaacagtggagcgatgcgtttcagaagagtagcagcacctttggcgaattttacatcatgaaaaacagtttcttcttccgttacaacacgagctttaatgttttcacaatcccaatttttgcgaacaatcttcaaaagctgcagtaaatctttacattcagcaatatcgataacacatccacgagaatcttccattatcgcacgataaccgtaagccataccataatcgttgaaagattgctcgatgataattaagttttccattttattctccaagttgttttctgtatcagtagttgatattgatatagtaccataatcaactactgatgtatacagttttatgaaaaaattttaaactttatgcatagagagctttgctatagtgtttaatccagctttcaggaatgactttgtatgttcctaaaaataccacattatacagcttaacaccgtcttctacccactgatcggtaatgtatgcgcacatagcacgagtataaacagccaaaccatcatctttgataaatttaaattcacaaggagcaatgaacttaatagcctgaccgagtttccacttaaagtctacacctacatgcgaagtatcaatcgtttcaattcctttagcaggaacagctttcaaaaacgcagattcaagaaatttcgcacgaacatagccaaactgaggtttagactttccatctttaggaatgatacgcacttttacttcagaatcttcatctttaacgccgtgtttaagctgaatgcttacaatttcgaccaattttcctgctgctttagaacgggatttatcagatacacgagctaattcaccaatattaataatcatagttatctctcacttgttaaaaagattttatactccacaggaccattatactctggtcccaagagtttgtaaactattaattcaaaatagctaccactgcactacgaggtactacactaaaatcacctgcatgaacaacgttcagaagttcaacaccatcttcaatccactggtctgttacccaaccacagaccgaaataaatggggtcttgatagctacagcacgagttagaaggtcagtaggatcgcattcttggaagaggataagctctgcttcaaagactatagttttaattacttcatcattatctaagcgttgtgctcgaatcacataagctttattcttatcatgccaattactttttgaaaaacttttaaccacaaactcgccttcacccaaaacactggtcaatgctttataacccaaacttagttcagtagttttaatttcagtttcaaccagtttgtaggttttgccgatttcaatagcggtagtcatagtaggttccttaatttccagtggtttaacagggcatacataagtgcttacaacatcaaaatcaatcagtttagctaccggatttggtgtgtattcaggattataattaaatttcataattatctcatttcaataaaatctacgagttcagcatgcgatttgcggaacattacttggtgcccgccaatgataacttggtcatttggcacttcatatacagcaagataaaatcctttagaagataattcttcacgctcttctcgtgtgaaccatctcatcatatcatattcactagcgaaagcaaaatgataaagagctataaaccatccaggaatatgatattctactccaacataatctttcttgaacttagtattaattactatattagcgtttttaactaatagtttatcttcgtgtggtaaaggaattcttttattatcatcactatgatgcataaaattaggtctactataacctacacgtaatagccactcttcgctccatgaatctattatactcctgtatggtgttatttgaacacaaagatttcgacgcattgttatagcatcttcataatcaagaatgctaaacgatgattcaacacgataaattttcattttattatcctcagtagctatggtgttataataccacaactaaccgaggaagtaaacaactttttatcgttttgttggaatagatagaggatcgcactcttcctctgacggagcatcttcaagacccatagcataccgcaaagcatacttcatcatcaggatgtctttcgcacagtcatgaatagaatcatgtgcaacgaatccatctaaagttccctttggaagaggacatgtagtcatatcacgaacaagcagaagtgcttcaattctggtacgaatatcacgttgattccagaatttacaaggttctaacttaaacgtatcaagctcattctcggaaacgccattaagacgttgaatatcgcgaatgagatcaactaaaattggaaaatcaaacgacattccacggcaccagccttgagatttccaaggatcgatgttatgtgcattgatgtaatcattaaattttgcaataccatcgatggtgcttacatcttcatctgatggtgcaatattttttcgagcttctggagattggtttttccaccattcgatagtgcttttagtaaaaagacgatgtcctttttggctttttaaatcaaacttgattttaatgccgcgtgaaactaattcatcaaacgtttcaactacttctggattagggtcaaaggcaataacagccaaatcaataacagctgccttttcaccgcttcccattgtttcaaaatctataataaaatcaaacattaaattttcctcgctaaatcgcgaatttgacctacagtataatcttggatataaactttattaataggctcatcaataaattttgccatagattcaatatctttttgtatctcttcaagactgtatactatctttaaagctttttcgcgaatagtaacattatcaggtcctgaattttcttggatgacagctttaacatttgtcataagagatttaaactgctgcaaacttaattcaatcattaataaccgccttataaagatggctaatttcacctaaaacataatcactgattgtaacagttttcacttcgccgcaaaagaattctaacgcaatcaaatctcgttcaatttcttccaattgaagcattaacttgcctgattcaattttcacgtttttgcgatttttactataagctatttcataaatttcgctcactttatcttgaagcagataaaactggtctttagttatttccacgaatagcttcctcaaatttaatcagcagcttacagacactttcatctagcgtaattaccgtgtctgtattactgtgatatgattgtttttcaattcgtttaattgctagtatagtatcacttataagattaagcttataaaggagctcagctcctgttaccataacactgaggttatcttgcttatcagtgtgcttctttataccatctattagacgatttaaatattttgaattgatgttaatcatatatcctcacacataaaacacatcataacgaccacgagtgacaccaacataaagaagctgctgagccaattcagcatctgcataatgaatacaaggtgtgtagatgaaagcacgatctacagacatgccctgagctttgtggaatgttgatgcaggaagtgctttcactttactaaactgcgatttagcatcccaaaaatcactccaaggagcttttccacctttattccaatttttatacgtttctgccgttttacctaaaaataagttaaacttatacagctcttcatcagatgaaattattttaatcttttcacgataatattcatcatcgccgtaagtttctactgttaaatcccaatgacgaattagatattctccagaaacaccacgagctttaacaaatgttgatgtatactctgcttctataatacgaactaattgtccgttattaaaaataatttctgacacaggctttccatcaattttatatgttttaattaatggttcctgcattacaataatttcaccaacgataaaatctttatcagtttcaaaaatctttttacgaataatgttatttaacttgtcaacagatttattcgtaaatgccattacgcgattttcaaacaaatcatctaatgattttacgattgaaaaataatttaccataaaatcgcgtaaagcggtatcaccagtaaatccacgtactccatgcccgtcaacaactttatcataaatccacttaccgttgcgaacatcagtagctacatcaataataggagcattactgcgtttaacttcagtgagttcacactgataaaaatctttatgtgtaaagaacggactgatataagcagtgttttctcctgggtcaacaggtctaatttgcttattatcgcctattccaattatagtacaccacggcgggatagttgaaagcagaattttaaatagctttctatcatacattgacacttcgtcgcagattaatactctgcatttagctaaatccggtacttctttttgttcaaaaagaacgttttcttcatatgttaccgggttaattttgagaatactgtgaatagtactcgcttctttccctgacagtttagaaagaatctttttagctgcatgagtaggagctgctaaaataatgccagtttcgcccgtagatattaaggcttcaatgatgaacttagtaagagtagtcttaccagtaccagcaggtccattaatagttacatgatgtttcttttctttaatagccctcataacgatgttaaaggcatttttctggccttcggtcaaatcatcaaatgtcatcgtaaattccctgcaattggtatactaacaatacgcccagtatctaaaattcgccgatataatctttgtgtgtctacatcaggcttaacatgtttaacttctattttattaaaccaaaacttgcgtggagtctcaactaatctcggaattcccatacctaaagctagtcgatactgatctttaagagtggtaaatactttatcagcaatctccctttcaaaaaatacagcagggcggtgttcatcaagaggaacaggcactgcaaatccatctttgtctctatacactatcgcatatacataaaacatattatcctcggataagtttaaaaattgaacaatttagcgggtatcctctttttagtttaagtttatcaataaaagacaagttttgataccgctctacaccttgaataattttatcacacatatcatattgcatttctgcttctgacaactttttcacagttttccaatcagagcctttaagaagaacgttcaatttaacgacttcagcgccttctgctatacgagaaccatcaatacgagctttgagtgctacaatcgttagcttaatgtcagaggtttgttttgatttagaaagctgagaaatgtgttcaattcggttttcacgttttttctgtatagctttaatttgattataagtctttttgattttagcccatttcttttcatctaaatttagtttatgaacctttttcgcagatgaacgaccaattcgcaaagcaaataaatcacgcttttcaatcaactcttctaaagtataatcagaacgaaatgtattgtactttttctttactgcaataacattccctttaatgtatccaacgttattatcaaaacgttctaatgataatttctctccttcaatacgattatcaaaaggttctcctgagtaagcgcaaactttctgatctaaaatgttcttaatgtaattgaagtctaagttaaaatctttagaacgtcttttagcagatgcctgggtatgctctagacgacgtgtaattttacgaatttgatttttagacagtttcatatttttctcacggacgggttaactacttatactataacatttttacttcagcttgtaaacaactttatgaaaaatgctttaaaactttcatggtataatgaatctaagtccttccattatagattaaatccttcaaaatcaagagtatagacagtgtatgttgaatactttttatactcgtatctatccgcaattctaaatacacttccagctggtatcattacttcttgttcatctgaaactaattccatattacgatagcgatggctatctggaaacttaaaactcggactatattctttacaacgtaaagcttttatagcatactcctggaaattaaacaccataggagctttgaattcaaaaataacttgtgtgttgtattctaatccagaagcaaagtgtagagctatatttttatcatatgaagctgatactactttatcaaatgtaataatatcaattccttgatttaacacctgtttagtctcaactggaacacctctccaaagaggtttatcgtttggaaccaaacgagatttgattatttcatttaaccaagaatgatcgtctggcttattagtaatacaatgaattaaaagttcaatttcggataaattaaatccttcagaaagtaattcttcacgaatagaagcacgcacagatgcatccattgatttgattttaaaatcttttaattgcattgctgaatatttcattcaactacctcaatatcatacactttaaatgttccaaatgaatcgtgtaatttttcttttgaaatagaagttattttatactttccaattggaatcatccattcttgttcacgtacaatcatcattaagttatcagtacgttctgaatctaatccatcagtatcttcatatgtatacttaaactcagtattaggagaagaaagtataatatcgctgatatggtcagaataattaaaagctttatcagtttttaagcgaaatattatttcagtggaatattcaacataagaaaaaccacatgctgtatgcaaactagtagtaaatgaatctactctgttcgttgaaaacacttctccaacttgtaaatctttaatgagttcttttgtcgattttgatataccacgatatagctgataaggcgatttagttaaatgctttttaacgattttattcaactgctgatgaagagcttcattctttttggcttccatacattgccaaagaattgactgttcaaagtcagtaaatttttcacagacctttttatacatatcatattgaaaatcgacactttcagcttttatagataactgttcaacatctgcaagattaataatcatgatagcctccgtatacttcagaagctatcatatcattgttaggaaggaaagtaaacaacttttttgaattattttgcccagggagcccagggcggagggtcaagatggtatgaagctagttcttctagaagagcatctggggcttcaattccataattctgtaatactatacggtactctttcttataatcactagaatcattctggatattcgtagaatgattatcttctaacatctcaaataaatccatattaattcctagcgataaaaaccaaaatgacgattagcttcaataatctttctttcttcttcggacattctccagcgtagtccaacatcaaaatgagcccagaccatcttaacaaatgcatttatatctttaatatcttcaataatgaatgttttacttttagaaggttgactagctaatttaactttatcgtcttcaaacaggtcaaaaagaccatattcattagctcttttatagcctttaatagttaaagcttcagaagaagaaaacggtgaatcagtattctgtaaaatatcttcagtatgctttataattagaataacattttctggatattttctttcttttatatctttaattaaaagatccggattttctgctaaaggaataattaatgagcattttttatcaagtgcatttactgatttaccttctttagacataaattctattgaataatgttttgctacttcaatcatgtgatttccttttgcctactaatggaccgtcaggaattttgttttcctggatatatttctcattttcttccatcattttactgccaattttaagaagcaaatccattgcttcatttgctttagccttggcctcttctagcgtcatatctctgttcatgatttatccccatagatatctctcatcaatttaagcgctgagcgttctaatttcttttctttctcagcactaatcattgatttcatcaattcttctgattcgttctgcatttctttatttacctgttcaacccaaccatcgtcaatgtacattgagtttggtctattgaaccattcaagcatcttcttcagaactttcacttgttttacctaaaacaatagtaggagcatcgtcaaattcatgaatttttagcaattttggatttaaattattccatacataataaatgaagtatgataaagcatcttcactcgcaattataaatttatttcctttatctattttccaactatatactgaatcgtacgaataaaaagataaaggttcatcattatatttttctgtgttaacattaatgtattctgatttagtaaatgcttcaattgctctaaacggaatatttggtacagtttcaataattccgatctttttaagttttatttcagcatcttctggaactggcattgaaacgaaattttctacgagatacattgggtcacaataacccttatcaatcattactgctacggtaattggaacgtctttagcaaacgacaaactattactgctgatatacatttcaaacaaaatcgcttccataattttcctcaatcacaagatgtagatgaacaactagaatcacaagaacttccgcatgaatcgcccgtccatacatgaacaggaacattagtatcatatgaatcagaactagactgtgtattctgcgtattagatgatgtaggtgttgaccagcgccaaggatttttataatattcctgggcttcttcataagtcatagtaactgcttctactgttccatctcccatataaacatattcaactacagttaaaggaaggtagtcatttgaaataggaactacaccttctccgggagttgtagagaaaaaatccgtaaagaaacttttaaaccaattaaagataaacattataaaaagcctctttgaaattcgactctttgaaatccaccccagtcagtgtatcgcatttcagcattgaactcgactgaaccatctgcatgcatcatgaatgaatgcgtgacgatatcacaatcccagcttttcataccccatttatcagagatagctttatcaagaaccttctggaggtcttcatttggtttaatccaacgatttaacatagtgctctcctctataagataattctattataccatactcattgtggaaagtaaaccggtaaaatgaaaaaaggactcccgaaggagtccctgaatttattcaccagttactttccacaaatcttcgtttgcagcaatccacgcagcacgttgattttcttcatatacagtagtatatgctgctttttctgaagggaatatctgataatgagcgccagaaattttgtgaacgtcagaataaagagggaaagctacagaaatttcttttccttcaattttcttatttccatctaatttctgctcaaatgttttaatattaacataaccgcgagtactagccatgtaattctccttttatttaaattacatgactatttataataaattctcacagcttttaagccgtcgtttatattaataacctcggtcttgacgagcgaagttttcggcattttttagataataaagtttaaagatttcttcagccgtaagaccgagaccttggaacatgttcagaacgaaatgaagaatatcaatcatttcgaatttaatttccaactgatcttgtggagataagtcagtaatcagagtttcacgacgttcaccatgttgggatttccacggcttccatacagcagatgcatctttttcgccattgctcataccaccaagagaagtcagaagttcgcggaattcatcatcaatataatctttctgattacgcagccaatcaacaacttcacctgcagtagccaaatcatcaggatgacggttatattcaggtttatctttagctaaacgaatctgcagagatttctgcatgtcaagcattacctgtagcgggtctttttcatcaccgagaatatcccaatattcattttgagctttatcagcgccttcgatcagttgactacattcgttaaagtaagccattatttttcctttcaattcatcaataagttaaataattatatcatttgagtatgtaagcaattaattaaaaatatatacttcatcagttccattcttttctttggaatgatatatgttaaagacgtattttttattaagatgcttaacattatattttttagaccattctttaagaagagtgttttcctttccgtgatgctctaaaacattcgacagtccaaattttattcctctgtcatttaaagaatctaaaagatttaaaaggtctttttcttcttcttctgaccaaaatttattataatcagcaactgttataagatatggagggtccacatatacaaaatcgccgtctagaattttgacatctttaaaatgcaatgaactaaagattattttatcacaattttgtttaaagtgattaaagcgtttttcactatttttgtttatagttctttttccaaacggagtagtaaaatttcctttatcgtttatacgaatcatattactaaacccgtgaaaatgaagaacataaagtaaaagaggatctctagttttattataatcttcacgtaatttcaaaaactcttcttttgatgtttttgatagtttatattgctttattacttttaatacgtcatcccatgatacattaataagacgcttatacatttcaataattggttcttgaatatcattggccaatacaggaccattgacgttcaaagacactgataaacctccacaaaataaatccacgaatctgtcatattttggaaaatgaggcttaagttcaggtaataatgactgtttattacctgtatacgcgatagctcctagcattatattctctcatttattgcagcaaaaaacgaattatataattcttcatcatatgtatttgatagtaatactaacacgttttgtgatttagcatattcattaaaccttgcttggatggttggattatcagtaaatgattctctttttgtccatttattacgtggataatatccgcatggcaaaaaaatctaatatcatcaatgacacagggttttcagtttttgtgtattcttttaatttctctttatcttctaaatatattccaaccgaatcaatagctgtacctccaccaacttggtgtttaatttcaattatatgctttttaccgttgcgagaaataacaatatcaaatcttctagtacgcttcttagttataaaattagaacaaaacaaattatttgatttttcagtatcatcggttaaaaccattttttcttgataactaactgaacaatcagtgaaatattcttttactttattaagtatgaaattttcaactacggcagatattttatatgaatctccgtttaaagccatttcatgcacaattttattaatcattatatcatcctcagcaatttattttataataccataacaagctgagaaagtaaacaaatttatgaaatttgtgataaatattaatttaaaggaggacatatggcacaaaaattaatggcacttgttaatgccataaaaggtaataaaaaacgtatagcttttactatttctgctatggtaggaattttactctggaactttattttatcaccaattgcaattgcgcatggtgttaatattccagtagttactcttgatacattcgtagatctagcatttgctttagttgggttaatttaaatcttggcatatttagataaccgcattttagccattaacccctgggcaatattatttttcatatattccataatttgttcaggggttgcaccttcctttctaatcatatcattaacatcttttgatttccagggagatttatcccaaaacataaccctttctcctgcatcaactaatttagtcattcgcttgatagtgtcagggtgacgaggctcattatctaaaacccacactcgtctatctttaaatggaacaacttctaggtctaattgaccacccgtaatagctataccattttcaataaaaagtgaatctataggtccttctagaacatatacatcaccatctttaactcgttcgactccatatatttttgttgcctcaggataagctttgatggtgatatatttttgaggagcatctttctttaatgcacgtccttgaaaagactcagcttttccattagcattataaattggaataacaagacgaggctcagaaatttcctttttgtatgttcccggtgctatgctattaactaatttaggccattcggttgtaaaccaaagatatttccatttatcctttggaatacaacgagcttttacatattttataattggatggtcttccgccagtttatctaatctaacacatgacggaagagatttaattattttcttctcaggatgtttaggaagttctttaggtttttctactggacgacttttacctttttcttttcttatttcaaagatatactcacgatataaatcaggttcaaactcctttaaatatattccgattggcgcatgatagttacagttataacaatgaatatttccttcattattatcaccataataccatccacgcgctttattttggtcggtttttgaatctccacaaactgggcatctaaaccgtaatttaaaagttgaactattatttacttgtgtgaatttaggtaaatgagctaatgcacgatatgcaaactcattatcaatccaagctattgatgacatttttactcttctttttctttagattcctcttttttctttttaggaatctgttcaggacctttatttactacagcacctgacgttgttccagtggagatattttcaggattaccacctgaatctccagctaccatatcttctttaataaattctttatatgttttcatattaacctctattcataaaagcattaaaaatttggtcatcaatagaaacatctactttagactgtttttctgatggtaattcatatccacatattacaattttgtgatcaatatcaaaatacacagaagcaatatgattaatgatgttttcagtaaagtctaaatcaacatcaatatctttttgaccacagcccaaaggataaataatgcgagtaattcgattatctttaacaaagattccaccgacatactctgtgctgcgtttaaagtctacacgccaacgaaatgaaaaatattcaggctctttatgagctctgctcataggacacaacgagtaactagaataagagatgtcaaatcctacgccttcaatatgagccaaagtatcatgattaaaccaattataatcgtacgccaaatccattagattataatatgtaaaaggcaccggattaacgtcattaatcacaagcatgtaattagcaactgctataatttcattgtttttaacgaatacaaaccgtgattgatgcgaatgacctggacccgcgttttcacgattaatgatataacactgggcacctttatatttgtatgtatctttgcacttgtgcatttgatagagcattattcacctaccacttcagcgatgatatttttattattaaagtttttatcgcaatacagaacataattatactgcattacaccaccagacttaagttgtttttgcactttagctttcatttcaggacgatcgcgctcaacgatattcataatatccgcttcaatttgagtttcaacttcagtctgatctgcagtcatagaccattcgcacaaatctttgtcataacccgccatagcaggctgagcagcgcaagaagataaagcaaaaattgcagcaaagataaattttttcatgataatctcctcagtagtttatgtttatatagtatctcaatttccaataaaagtaaacagctattttaaaacttctgcataatcacatgttacaaactgtttctctaacttgacgattttacgaaagtatcttttgcattgacgaatctgccgcttcgtagggcgcacagcaaacttaataaattccactcgaccagatggaggactttcttctggtggaatatctaatactaattcccacgtatctgcaataagtgctttgaattgagtatttttcctgacattatacggagtaggtttaaataaaacgatatgcatattatcctcggcaatccacttcacataccttcttgtcatcaatgaaagctttaactagtgctttattaacttcagcatattgagtagtagcccattgaacgtcatctttcatcattgtgatctctttagtaaacatgctttcattcttaaaccaccccataaaaactacctttaccaattccataacaatctcctcatttaaccaacaagactactataccatagtcttgtcagcttgtaaactaaaattttaattcatttgccaaagcatctaactgagctcgagtcgattcgtttctttgatagcgattctgctcagcttgtatctgttgtgaacctgctacctcactcacttcagttggagtagaatcttgttcaatttctacccatttctgatttcctttttgaacacccatcaaaaacttattccatttgttcttatcgccatatcgtgatttgatttgcttaatgagttgttgttcagcagctgctagctcctcggtttcaatgaccgcaagcataaaatcagctgttgctggaagaccggcagattctgcgatatcactcatgttaacatcagaagaatcccaagcttgtttaccaacctgtgctgcagtccaaagaacagtttcggtttcaacagccagagcacgcaattcctctgcgatagctttaacagtcgtgtaactattttctgaataaaccctaatgcggcaagatttacaaatacccagatagtcaacaataatgattgttggaacaaaattcttcttgagcttcaattcgtttaaaagagatcgaaatgtattagcgtctgctccaccagtaggatactgtttaacgattaaacgaccgagagtagatttctcacgccatttttccatttttcctttatactcagcgtaagaaatatgtccatcatcaatgtcatcaagagaaacatcaagcatgttagcatcaatacgtttagcacagacttcttctgccatttccatggaaatgtaaagaacattatgtccgagctgcaaataatctgctgctaatgaacacaatcctaatgacttaccaacgttaacaccagccattaaaacattcagtgttccagtttcagctccgcctttagtaattttatttagaattttgagtttaaatggaaccttacgagctttattcatataagatagccaacgtgcttcgtagtcatccatccaatcatgaccaacgtaactatcaaatgaaattgataatgcttggcgcatgatgtcaggaatagcacctacatctggcattttcttatttcgtttttccggaggaagctcagcattagtttgaatttcaattattttagatgtagcattaaacatcgccctttgctgaacatatttttctgtttcttttactaaccagctgtggtcttctggagaatcggctagtttcgaaataagtgtttttacaccagaatattctgtttcagtaaatgaactattttctaatgcaacatttaacgcattaatagatggaacgctatggtactcattaacatgagatttaattaatttgaatgtatttttagctggaccactttcaaaatattctgaatccatatatggccaaacttttgaaaaataagcttgatcaaatatgagatgagaaagaataatttctaccacacttactccttaaaagaatttaaattttttctttgaccttttattaaatgcatcttgtagttgcattgtaatacatttttctacatgaggagctaactcagcttttctttcttggtcaagaacagcaaagtccattacgacttttccatcaacccaatctaattttgtcacatacacaatgtgtgtagaaccatcttctagtttaatgacaatctcctggataacattttccatggcagatttaattatcttaagagattcattaaaaagacgttcttttctttcttcttccccctccgaagagggggattcatcgataatttctagatctaaatctaaatcatctttattcattaaattcttccatatcacttaactgatctaggtcagtttctaaatcagctgctgatttacttttactttctggagatttaaatttttcaacctttgagttaatcaattcatcaacttcagcttcaacaatttcattactatcaatagcacctaactgataagcacgtttaatagcatctcggaatggctgatgcttaaataaaggaccccagaatgtagtgcaattggtatcttttgcacgccaagatttttcttcgcgaatcatctcgccagtttcttcgtcaagaaattcacgagcataccagccatttttaggttttaccacaaatcctaattcaagagccatatctaacaatccagaataaggatcgataccaccatcaaatttaacatcaataaagaatttacttttttctttaacggtacgagatttttctacatttagaacaaattgatacccctgaagatcagaaccatctttaatctggcgcttaccgataatgaatacggtatcagccgaatacattacgcctgtaccacctgtcatcacggttttactaaacatttcaattgtttcaattgtgtggttaaccgcaacacatggaatgtttttaatactaaaataaggagtaacaatacggaataatgacttcagtgatttagcacgagtcatatctgccacagatttttcattcaaggcatcttccgtttctttcttagaagccatattaccgattgagtcgatgaatacaataactttttcaccacgctcaatagcttcaagctgattcaccatatcaattttcagctgttcaactgactggattggtgtatgaattactcgttccgggtcaactcccatggatcgcaaataagctggagtaataccaaattcgctatcatagaatagacaaaccgcgtcaggatatttgttcaaatacgccgcaaccatagtcaaagacatatttgatttaaagtgtttagaaggacctgcaaaaatggttaaaccagactgcataccaccatcaatcgcaccagaaatagcgatattaagcattgggatttttgtacggattacatccttttcattaaagaatttagatgtagtcagttcagcagtcattttagaagtggaagctttaatcaaacgggattttaaatctgcaatagacattcattttttccataggcatcattatattttcctcactggttaaagataaagtaattataacacaataaatttaggcattaatcaactgctattggatgaatagcattaaacttatgaaacgcttctgatttttctttgcgcgaaacacacatgcgaagaacctttaatggctcatcttcttcacccaacgattttctcttttcaatattcgatgttttccaacgagcttgctctggaaactctctattgatttgctcaagagctctattatgttttgaattactacgaattgaactacatccgcctggagcttgtgcttttccagatacaaccagatatttgaacaaggccaaatgcggataaccttgattaattaaattgagaaatgcatacatatcttcgcataaatcaatttttccatacccaatttgttctgtcgtgagttttccgaggtcataccatgtattcgtgaatccatatgaattttcacgataattaccccaagatgaagtaattttaaaaataggcagacgagcatgaccatgataatacccgcaatccatggcatcttcaacgtattgaatcaattcatagaactgttcacgagttaattgattgattttatctacgcagcgacgatcatctttctttcgcattgaactcatacgaatagtagtatcatcatcaatcatccaaattcgttgacctgcatacatatcagtaattgctttacgagtgccagcaattccattaacatcatcaggaatagttataattttggctctagacccgtaagcgtcataataagctttttcttcgtgttcacgtactacaatatgaggttcataatcagtcggaaacatatcaagggcagaaactgcccctacgcgttgatagcttggaattacgaattgaatcatttccactcaccattataatcttttttcgcaatatgagtttcgccagttttccaccaatggtcaaccaaataaaaatgacgggaatacacatgaaggctcccgacattccatataatggaacctgctttatactgacgagttgaatcacctgcattcaaatcagatactaatttatctagtacgtatttttgccacgcataatcattacggaatccgaagaccacgtcatttgaacgcatgcttactactgcattgactttcttatcacgaatcaggtactgtactgtattcgtacacatgaaatctgacataccatctttattgtagtcaaactgcatggatggacgagtataaatcatgataccgcgtcgagaatcaggattttgaccaagttcagctaaacacatatcatactgggcatagttatcttctgaccagatggcccaaccataattcgagttaatttcgcctttagaagatgctacctgttgccaaatcttcggtgtttcacccggaatatctttaacaaacaaacttttagatttataccattcaagttcacgctgaatgtattcatcattaagagcgccaaaaataaacggttcatctgctacaaatgatgcgccaataatttcaatagttttaacgccagttttatcaattacgaaatctttttcctttaacgcaattcccaaatgaagacgagtttcttcaactgtcaaagagtcattaatcatttaaacctcaattgatacattcatatttaacttgtaacagtaataaaccccaacctataataagtgtcggaatcatacaaggaaccgttacgctatagtatatacttattataatcatcaagattaaaagcaatactgttaaaattttgcttttcattccttctctctgatgataattacttgatttggttgtgcggattttttagtttcacccgcaattgaccaaataaatgtaataaaccaaccaataattgaccagttaaacagtaaagatgtaaaaaagattcctactgtcgattttgacccacgcatcaaggcgatgaaccatggaagcatgtatataataatagccaacacgcctgaaactaaaaccataaaaattgaacctgctactaaagtttccatcttttcctcacttagtcaaattttttacgcatgaattataagaattcactacatactccatcggagcatttttaccggtacgccattggtaattattagcccaattagcccaaagttcggcgcagtagttttcaattttttcttcacgcgtaattacatctgaattacgatatgcttgagcagattcatctggacgaatagcttcgtcaaaattcgcctgcatttgttctactgtctgttttggagcttctttataacacttaacattaggattataaaatttgcttgaacagtttacaatttttcctacatcagactgatttactactggtccttgagctacacaaccagtaagacctaatgtaataaccaaaatagcgattttcatttcattctccaaatttgtattggttgatagttgtatagtaccacagaggaacagtcttgtaaacagttttgtgaaaaatttttaatgaatttacaggacctagaatcatctatttttcctaagtatagatttatattacttgtatgaaaaagggacccggaggtccctagatttattctatcagccaaacaggaagtctaacgaagctttttcctcatagtccatacctgccgattcacacataccagcaagtggtttaacaaacgatttttggaacaaagttgagtagtcaatccaagacagtacgtcagaacgaatttcttttggaagttctgtgcctgatggccaagcaatgcacttgtcaccaaatggatttccctcgcgtaatggaagaaccattactttatttccatccaaaattggagctacacctaaaccgctaacagctcgacgataagttagcacaccacgaatatggaacggacatttaaatcctggccaacctttatcgtcgtatttcgctatatcattcgcagtttttacttcagcaataactttatagtcaagttgacgatattctttctcaaagttcttgtagtattcttggacagactcttcaccttcctgaagaatacgacgaatactttcttcgagagcttcttgtactgcttttggcgttgaactctgttgagtttccatacccatgatttttagatgcggttcggcaaatcgcttatcttccatatcataaacgttcagagcataacgttttttcgctttccaaaatccaccaacaccctttgaaccaagcggagggcaagaaatagcttcacggtccatatgcattagatgttcgcggttattcatataatcacacaactcacgatatgcaacatcaatcataggttccatctttttcttaccaaactgattcatgaattcaactaaatcattttgttctttaaagcgatcaagacctactttttcaattactttatctacacaaacatataccgaatcagtatcacctgctgcgatgaaatcttcaccattagttccacatactttattcagatattcattaattttgcgagcaatccactgaataccaacttgaccaaaaattgtgatagcagtagcatttcgcaaatcatagtaacggaaatgaatattaccaagagcaccataaagactattgataagaattttacggtttagctgatttgtgttagcaagtgtagctgctttttcgcattcttcgatcagactattaaggacagattcagtataatttgatagttcatttaagaaatcatcactgaacttaacatatcgttcaacttccggtttagttgagcgagaccctgcgcctttcataataatctttttaatagcttcggcattcatttcttccgcgaacattttctttttccaatctttacgctggaaaaatactttagcgatttcctttggaatgataccttcttggtgcttatcatacatccatccattcggagagcaagaatattcatcacttggcttaggagctgttcctgcgatatattcatgaattggatgaactttaaactgcccacgaatagtctcaggactaatgttaacctgacgaataatgctaggatacagagacgtcaagtcaaaactcataatgtatcgacgagcaatcggtttaggttcaaacacaaatgcacctggaaaactctgtttaacgtgcgaaccttgttgaggaataaccttatgttcacctttcagtgagttaaaaataatagcatcccaagttttaataggactcattacaccagaaaaaggcattttagcgtaataagacatacttaaaactagatcgataaacccacgaattttatcaattgcttgaactgattctacgtcaatgatgttataactaatgtatcgttgatgattagtctcacgaagtttattaataggaccatcgtacggcaatttaccttttttggtttcatgttgagcaactgattccaaagagaatgatggcaaattagtaaatgcgaatttcttgtacaaatctaaataatcaagaatagatacgccatcaatagaataaatttctttgctaccgtacatattttgaattagtttagattttactcgaccgattggagagaagcgtttcatactgcgttcaccgagaaccattttaacgcgattcatgatatacggaacgtcaaatccctcaatattccaaccagtaaaaatagcaggtcgtttctgttcccagagattaatatattccatgagcatatcacgctcattatcgaatggcatataaattactcggtcaagaatttcttgaggaacttcatcaccaccttcacagtcaagcttagcagctaactttgcatcccattttgatactgaaccgtacattgaattcaacaaatcaaagacgtaaaaacgatcgtcaattgaatcataatgagtgatagcatcaatttcatattctgctttcattgggtcaggaaatttatcaccagtaacctcaatgtcacagttagctacacgaacaaattttcggtcataaacaatttctgaaccatatgtatcactgatataagcgagtttaaaatcgttcataccaagagcttcgagaccgatgtcttccattcgcttcatccagtctcgtgcatctttcattgatggaaatttttgaggagcacaatttttaccataaatgtctttgtattttgactcttccttacaatgcctaaacatagttggaagatattctacttcacgagtacgttcctttccattttcatcaatataacgctcaacaatgttatttccgactgtttcgatagagatataaaattctttcatagatattccttagtttatagcccgagttattaggctcttgatatattatactccaaataaggggccgaagccccttgcttaaattaataccagttgtcggtgaaaaattgttaatccatctgcattaattgacttaaccactgcggtaaagtgtttttgttctgggtgaactaatttttgaaattctacctgaaattttagttggaggttttctggtaaatcaaaaagtgtttctgttgcagaaagattatatttttctttaagagacgccatgtattcttgcggagttatagcagtcatattaattaccaatcgtatatttaggaacgagtttccattcgtgtttttgtttaaaagaaataactcggaagttattagttaaatctttcataaaagttctttgaccaggaacgatttcaatcagcccccaatcttctaacagccatgcaatcgaatcacgacgaacttcatcttcttctgtcatttcaacctgacggccatccatacgaagcatttctttaaaatggacgatatagtatagtccttttttctgaagaatgtggcaggactgatacagaactttatctttattattagcaattcccatacgagtcaaagtttcttttactttcagaaaatcttcaggttttttaagagtaatttcaatcattttaccattccaatgctagttttttgagttgtttctgttcttttacattcttagtcacttcttttaaaaaatcatccgtgactaaaccttttagttcttttaatactaaaggaagttttccatttttagtaagaattgatttatagttaattgcatcatttgtattaacttgataccgcttagcaagtaacttaataatcaatacttcagtagaatcttcgaccagttttgcccatttaccatatcttttaccacgaggaacagcagccatcagataattaaaatgggcttcatcgcttaaacctgatccaattaaattcatagcatatacagctggcatgcattcaggaaattgtgataatgcattctcaaccatgtattttgaataatctttttgagcaatagagcatttagttttattattaatagctccaattatttcaaaaaattcattttcagctttttccttaaaagaatcagcagcagattggacagctgtccaatcttttgaataccaagcaacttgatgctcgtttaattgaatatcatcttcaaataagctcatatcacttccactgcatttcgcatgctaattgaatgaaaagatatgctaaatgtaattcagtattagccgcaattccgtgatactggttattttcaccaacaatttcatacatacgaataatactttgcggagttacgcgtgtatagatttcttcggcaagtttacctacgaaccacgaataatcagctgcatattttggtgctaaagctctgagctgtttaacatctttatttttgagagactcaagaacatcatcaatagcaccacgatcgttagtaaccagtgataaaataccagcatccaaaacacctttagatgaataactatcgagctcaccaatagttttacgaaaatcaggaaaattctttttaaccaaagctgctacaactttcatatcagctatagcaattccttcatgcttgcagatttcagtcaatcgacgaatcatctgcttcatcatttcaattttatcttcatcggtcggttgaccgaatgtaataactcggcagcgtgactgaagcggtttaataataccatcaatattgttagcagtaataataatactacagtttgaactataagcttccataaaggaacgaagatgtcgctgagactctgctaaccctgagcggtcaaattcatcaataacgattactttttgacgaccatcaaatgaagctgcactagcaaaattagtcaaaggaccacgaacgaaatcaattttacagtctgatccattcacaaacatcatatcagcatttacatcatgacacaatgcttttgctacagttgttttacctgttcctggagaaggagaatgaagaataatatgtggaattttacctttacttgtaatagatttaaaggtttctttatcaaaggcgggaagaatacattcatcgatagtagatggacgatatttttgttcaagaatgtgttctttttcatttacagtaatcataatttcctcattcaagttttagtgtaaatttaagggccgaagccctttattaaaagtcgtgggtagaatcagcttcaagagctactacataattcgcgtgttcaccttcaaatttagcagcaccttgtttaccttttgcccaaaacagaagtttataatttcctggttgcattttcatatttgccatattgataatgaaattaaatgtattttcaccatcataatcaccaagagtcaaagaatatttaacacgggtcaaagcagaatcttctactttattaaaaccgttaattacgattttaccttcttttactgtgatagcaattgtatcaatctgcagaccgcgagatacacgcaacagctgttgaaggtcttcagctttaatttcggtaacaacagatgctaccgggaatggaattggtttattaggagcaactactgtactcggatcggctgctggccaaaaaattgttgaacgagcatcagcaattttaatatttccatcttctgactgggaaatttctgcatcgtcattaactagggacagaataccgagaaaaccgttcaaatcgtaaattgctacatcaaaatcaatagtgtcagaaatatttgcttccgcataagttgtaccattaactgcgcgagtcataataaattgaccagatttaagcataatgccagagttaatagtagcgaaatttttaagcagagcagtagtatctttagacagtttcatgtaatttccttcaattcaaatgagatttaattttataactaatttaataaagcaattaacgattaaaatcggcagcaattgtttccgcaacaatttgagcagcgacaattaggcgttcatctgcattaccgcaataatcgtcttcaaggcgttcaccgcatgaagtcataataaatttagcaccagcatttaaagattctgtcgtatgtttgcgcattagttcaatccatttattacttacttcacgatcgatagcttcataatacgcatgacgagcaggtgcagatttaattttattctgaataacttccatcgcgttatcagaaagagacaaaacccatgctcgacgaattttattttggttttgtggatttgaatcagaacgcacgtgttttggctgaatatcttttacatcaacagtataattcacagtaattttagtcataatacacctttagtcataataatcagtaacagtccaagcttcatttctgttggacattattttcgtatattctgctttaaatgcattcttaagcatagattcagtaactatatgctcttcattagaaaaattatttctcagaatatatcgttttatttcaggaatagttaatagatgctgtccagttgaatattccatgtttttcctccatagagattatactctaataaattaaagcataatctcttataaattaaaccattacagtaaatcgaccaactttcttcatttgaagatgctgaccatatgcttgtgggtcgtggtctctatgtgaaataacaaaaacattagtattttttaaactatctaaaatagttgaaatagcttttacaccttcaacatcggttgctgaatcaaaaacttcgtcaagaattaacgtgtttattttaacacctgaaactttttcagcaatatcacgccaagtaaataaaagagcaatatcaattcgtgctttttcgccttgactgaatgaagcataactaaaatcttcacgaccgcgggatttaattgtctcattaaattcttcatctaatgtaaacacataatccgcttccattattttaagataatggttaatctgcttattaaataatggaatgtactttttaataatagcacctttaataccagaatctttgagcatatcagtcaaaattcctctgtggtatttttccattactaaattagtttttgtcttaacaattttatcaagttcttcttgaagcagtgctatttcatcagcatggtcaataaactcagatgatgctttttctatagctgctttaacttttttagctttatctaccgtcgtgattagagattgctttttattgcgaatatcattcgccaacgtctgctgggttttaatattatctcggtattcatcaacgagaacttttaaattatcacgatgtgttgaaagctgttcaaacgaatgcgtgcattcagaaactttatctttaattttagaaacaactttatcaccggaacttaattgtgacaaacaggttggacataatccaccttcgtgatacatattaatgactttattatacgagtcaatttttgatttaattaaaaatgcttcttgaccgattttattaaatgcatcagtcgggtcttcatccaaaacaatattaactaatctttcattagcttcttctatttccgattttaacgttctagcttcttttgccaaatcatcatacatattctgtagacgagtaaggttatcaccagttaattttttctggcgttcaacgttatcattatatattttaatttgttggataatactatcttttttaacatcaagcacttggttttgtgaatttaattcacgtattagtgctttattaagcttatccatttcagctaatgttcctacctcgagcaggtcttccacaagctttcttcgtgcaggggttgacaaacccatgaaaggggtataccctgctgtaccaaggacaacaatctgcttgaaactggcatatgacattccgataagctgttcaaattctgcttggaaatctttactgctggcagattcattaagacgtgtaccgttaacggtgatttcgaaaacatttggtttttgtcctcttttgatatagtactttttctcatcatattccatccacagttcaactaaaagttctttcttatttgtgctgtttattaattgacctttctttacatcacgaaatggcttgccaaaaagcccaaatgtgatggcttctaacatagtagacttaccaccgccatttcgtccagtaataagagttttttgaaccttatctagttgaatgtcaataggatttccacctactgacattatattttgatacctaactcggtttagtttaaaattcttcacaaaagattccttttaatgtatcttttagaccattctatcatatcatcataatctaaaaagtattcatcaaattcagccatgcaaacaacgccttgtgctgcttttgatgtgatataaattattccaacatatctagaatcttcttcggtgtaatcaatatttgctatgaattcatcgttaatgtcaaatgtcgaaaacttcacaatatgcatccttaatacaagatacagccatatcttgtaatgatttaggtgtgtcattatctaaaatgttgaagttaaaagatacagcccagtcagtgcaaaccgtaacctttttaatacaattatcttcaacctctagtggttcaaaccaatattcaataatttctttatgcccaatatcatcttttacttcgcattcaaaatgctgactcatcataacatttttaaattcatcaaaagtcattgtgttgcctctacatataactgatttgcatattgaataagtgcttcgcgatcagaatcagtgatgtctggaattgcattaatgtattcttccatcaatgtctgaagagattgaacttcaacttcttcactatcatctgactcgacagagttatcaatctttgacacaactcgtaatgaatgcacaactttttctagttcagattcgaacttcgttagatttttgtctacctcagttactataacacgtactgatagatttgtaaaatctttatagtcaatttttcccttaaatggatattgaattcgacgatgccaggtagtgttgtttggaataaattccattcgttctgtttctgtatcaaacatccagaacccacgagggtcattctcgtcacctgcagttagtgtccatggtgtcccaatatatctgacgttagcagcctcagagatagtatggaagtgaccagaccacacctctttataagtcttaaggaaatcaggttcaagaccgtgagatttcattcctttataaaaataaaatccattcagttcccagtgaccaacacaaaaagaagcagatgaagttttgatgtgttcaagaatttcaccagtattttcttcacacatccaaggaattaaatcaatcaaacatccgtcaaaatctactgtagtaggcttatcatatactttaacattaggatatttagccaaaagctcagtagaagcatttggagttaaagtatttttaaagtgcatatcatggtttcctacaacagtatgtagggtaataccagcatcatcaagcatttgaactatttcacgagcgaactccatagttttatgcgtgattgcttttcgcacatcaaaaatatcgccgtattgaatccatgtagtaattccatttttcttagaatattctattgcttgtttaattccatccaactgaatggattgaacccactcatcatcggctttaacacctaaatgccaatcacctaaatttaaaattttcatatatcaagaaccgtcattgaaatgcaaaataaaattattgaaataaatccatctggagtactaaagaacccaatccaacatgctctggcgaatagataaaacgctagaaaaagtatcacatatccaagaaatatcattatatcaaactccgtataaagctaaagggccgaagccctttattttgtaataatgtcaaactgttctttaaagcagaagcttgaatcttgatgctgatacaaaaattcataagctttttcgcgttcacggtcataaagagctcggtcagatgacagttctttaatacgctcaaatgttgattccatgtcattttcatcaaaccaaacgataccgctatcatgtgaaattaacggagtattatcaacacggaattttaaattttcaccagtagatttccaaaatactggaattgttccgcatgcaccaagctcgagatgagtatattctaaagaacgttgcagatattttttatctaatttactcagctgataaccaaatccggatttactcatgcgttcaagcatttcgctatttacataacggtcaagaatttgcgttggcaaattaggagcaattttaatttggtctacttgatgaagacgataatactcatatggaattcctttttctttaataggaatgaacgctggagaacgttccagaccttccataatagtacttagcccagcaggtttaagatgtttttcgtgaaaatcaaacatctgataaaaacctttccatgtagtcgtacgaccaatccaacggttgacattcatattaatttcagaaacatctttccagtatgttgatcgaaccttcgcaatatccataggaggctgaaagttgtatacagtcggtgcttcttcaatatcatcaaacagagaaactgtttctggataccattctttcatcagaactttattaaaatcaccattatcagaatgactaaaaataacatcagctcgacgaacagtttcttctaatcccaaatttcggcgcaaagaaagagaagaatggtcatgctgataaactacaacacgaactgaaggtttaatgttatcaataatttttttatagttattaatagtgtcttcttcgactgaagtagcaggaactgaattgataattagaatatcacaatcatttaccagcttaagtgttttatcgtattcttttgccaataaaaccggaattgaaaatgatttataatcatgcgcgcaattacgagtaaatgatttatctttagcataaaccaaagttacttcatgaccatttttaataaaccagtcacgctgctcgagagaaaatttagttacgccgcaaccttcaagacctcgagccataaaaatgcatactttcatttaatatcctcattgttttggtttattttaccaaaaatttataaagcaatataggagccgaagctcctatccgcataatacaccatacagaggctcattagagcttctaaattttctgcgcttatatgttatagttccttctgctttagctttatcatgagactctttaaagcgtctcatcacttctactttagaggaacgaattttattataatctatttcagaagtctggatgttcatctttcacagttgccaccattttttaacttgataagaatcaacccacactttcatattagggtctgctcttacaataggaggattaacttctttaattgaactatcatggtattctttttcagaaattttcacacaaagatgaccattcagagattcagtaaatcctgcattaattttaagacgcttgaattttacgtgtgtaagcatcaatcatatcctcaatctgcgatctagtagtcttccaaagaatactaatgagttcatcgttatatggctgttttagaatatcccgacttttcttgatagcatattcgtattgagcaaaattattgttttcagctgcaatctgagcgtgcttataaagacggttcagttcacgtttgtttttagacaataacttatttgcttttctttctgcttcaagacggttcttttcttcaatagaagaaataagcttttccacttcatcattaatttcgggtttatcagtcatattatttctctaatataaaataaaaatcatcatctgttaaatgataccgatagtttaattctacaccattagatttaaaagcggtatcatacggattttctggatcaatatcaatgtcaagagctaaaacttccctgagatacattttaagtaaatagggaatagcttcaacttcaggtatttcttccaggaatccggagaggttaatcgttagcctcatataaaaaatccaaactaggagaatcgtctacaacacttttcttttcagcccccggtgttctataggttgattcttcgtaatgcgtcattttatcgtagatgtcttgaataaaagtttcatctactaacgcaaccatatcgtcgtcacgactgtcatagacattgtgaacgaagtaactgtatttctttgcaacttccttacgttcttttttaatacgttggacgaatgcattaaaacaagcttgagttatatatgcatgtgggtttttatatttcgtttcatcaaaattatgaagccccttaatagaagcttctataccatctgcaatcatttcttgtttccaggattgggtgtatcctgaaaagttgaaacgtttagataaaccttctgcaataagcataatggctaatccgatagtatcattctgacgaactactttatttgggtctttattatttgctaattctgttttccaatcaataatagcttgtaaaagctctttattgtttacgtaattatatttaggcttagtttctgacattttcacctcttagctcaattcatagatctattatatcataatatttgaagatctatcttaaagcatagaggatatcagttatctaagtaagcagtatgcttggaacactttctccatcatctttttaaattcatgaatatctatgtaatgactagttaaatcagcgtgatataaaaagtctaaaaacttttcatgcgtgctaacatattcactttcatttaattcagaaacatggctttcccaatatccaacaccagtcttatttgggaaaaatgaaattttcatgtattgatcaacatagaaaattccataattttcaatagtaatagaaatattaataaatttcatgcattcatcaacttagccgcttcaagagctgcatctagtgaatcaaactggtcaacgtattcaatcagtttgccataattagcgtataaccaccattggctaaattcatactcaaggatgaatccatttccttcaatttgagttaaaccaatgccatttgtatttacttcatatccggcaagacgtaaatcgttaataagagcttcgttcatattcataccttagcaattttcaggtcagcaaattttttcttgcgttgatttttcatacgacgaatagttttatcagaaatttcatgcttttgataagctttagattctacaccaaaagctttaacatcaaattctgacaagatatattgaaccaacaattcacggacagtattgcgcccaatcttctgatcattctgtttcatcgtctgatgaagctctttttcccatttatccaaaatttgaggagttacaatatcgcctttttctagcaaagaaactactttatcatatgcataagaattgatggcgtttttaatttgaatagtcatacattatcctcaattacattaaaattttattatccaaaaagggccgaagcccttagctaaactttttggcacccttccagccttcgtacatcattgcggctgatattaatattgctcctgagcaacttgaatatttgtgattccaaaaccagtttagaaaaacttcgtcatcaataccttgggctatcatattttcaaagaactgacgacgagcttcagcaattcgttgcgataatttagattcaggattcatttaaattttccagttaccattttcatcaataaatttaatccagtcatttactgaccacttggtcgtatcgccttttggagcaacatttaaagtgtataatccttgtttaaaaagcatgcgtttgatattcatattttcctcagctgtaacgatagcactcgtttgatttgcgcttagcaactcgttgggaagtattgtaatcaaaatcatcgtcaatgtaaactgattttttcaactttcttacttcaccgcgcaattgacgatttaactcatctttaacttctgaatcaatgcctttcattctacgccatttatcagagcgaaaaatgttttcaaccatatctttatgacttacaccatcaggagctttacgctttccgaaatagtcataatcacgaactttcaagtctttacgacgatacgttttacccatggagtttaatttccttagcaactgaactaaatacagcacgatcgcaaatcatctgtttattccatttaagtacagtataatgaacatctagatcatctactgctgtaacaataacaatatgtccgttaacacgataatactgatctcttttaatctctttatcaaccatatcaaatcctcaaaggcaattcatatgttaataataccacagtttgaacttgttgtaaacaactttgtgaaaattattttagggaacgataagaagggaacgatagcttagaatggtaatatacagaatgtgagaaagaaaggcccagagggcccgtcttaatcttctatgatatctctatcatatccaagtgaaatgagagtttctttgaagtgtttaatgttcttttgtctagaatcattgatgaaaatgactggataacgaatgttaagagatgtgaatccagcgcgtttagcaagagatacaatcagtggacgatcatactcaatcttaccattatttgtaagaactttatagaaagtaaaaggagcattaagctcctttagaagttttgtaactgattgacatccaggacaacgacctacttcatctggaattccatagacttcaatcttgttttgtttcacaactattccttactaagagcagcattcagcttattagtaattttatccagacgctcattgaactcgctagaagacagtcctttttctggagaaatcaaactaatcacgaaaaatataacaataaaaggaataaggaaaatagctccaactgccataaacaaaaagaatgctacggttgtaagaaaatcagctaaacctttacgaaatttatacatattttacccttaattgattaacaaagcattgataagcactaaactatattgcgaataaaattctggaccaaaatgaaaaatcatatcatttatagtgtccataatataattcaatttaatcatgtttccacaccccatcggtatttgaccaaagtcgctgattatctgatcctcgccacaactttttggtcggaagatttttctcatacttcccatcaataataacatcaacatatttaagcatttctagttgtttaatatcttcaaacttgtaccctgtccacaaccaaatgcttttattgggataaagattttttactgtttgaaccacagagtgaataacatctcggttatcaggatagagagggtctcctccagttatagttaatccttctatataatcattattcaaacattcaattaattgttccagtgtttcaccagtgaatggaacgccatttctagcattccatgttgatttattataacacccttcgcatttatgcaaacaacctgtaacgaaaagaacgaccctgcatccagggccattcacaaaatcgcaaggataaaatctatcataattcattggtgtttaaccctatgcatgatttctttatttttgccgagattaaatccgcgttcgttcggatttcccaaataaccacaagttcttcttatcgtattcatctttttaggatcagtttctccacaaatagaacaaacaaatccgttttcagtaggagtcatttcatgggtacttccacatgtaaaacatttatctactggcatgttaacaccaaaataatctaaatgttgtgcagcataatcccatacagcctcaagaccttttaagttatttttcatatcaggaagttcaacataagaaatgtgaccacctgtcgcaatgaaatgatatggggcttcgcgagaaatcttttcaaacggagtaatattttcttctactgaaacatggaaactgttagtgtaccagcctttatcagtaacatcttttacacttccatatttttcagtatcaagtttacagaagcgatagcacaggttttcagcaggagtagaatacaagctaaaagcaaaaccggttctttcagtccactgtttaagacgagcattcattttagttaaaatttcctgtccaatatcacgaccgacaagaatattcaattcgtgaataccaatgtatcctagggacactgaacttctaccgtttttaaataactcaattatgtcgtcatcaggtttaagacgaaccccgaatgcaccttcttggtaaagaataggagcaacagtcgctttaactccttttaaggaactaattctacacatcaaagcttcaaaacacaaatccattcgttcattgaacaattcggcaaatttctgttcattgaattgtgttccaatataagaatctagtgcaatgcgaggaagattcagcgttacaacaccaagattattacgtccatcaagaatttcattaccagtcgaatctttccatacgctcaagaaactacggcaacccattggagaaacaggaatagatgaaccggtgatagctttattattcttaactgaaataatatcaggatacattcttttgcttgcacactctagagcaagctgcttaatatcatagttcggatcgtctttataaagattaacgccttcttcaacgaacataacaagtttagggaaaataggagttatcccatcgcgaccaaggcctttaatacgatttttcagaattgctttctgaatcattcgttcagtccagtcagttcccgtaccaaatgtaattgttacaaaaggcgtttgtccgtttgaactaaagagagtatttacttcatcattatattcagcatgagtcgcaaattcatgcccgtttatatgaaacaacaaaatttggatagtccatagatatgcaacgttcttttatagtgctaggatgaaaatttagcgctttagctgcttctatataagacgtatacttaataccgtcaacaaccacatattcaggaattttatgaatagtagtcttaatactcaaaacaagaggatgagtttcgacttcactttcagtgcaatttaaatattccgctgcttttttaaaacttctaaaagttttatttttaagctttatcgatacttgttttttactttttcgactattgatattattttgcacatgttccttagatcttccgtttttagcataatattcagctacagaagattttatattgtttttatgagattcggataacactttacccttatgagcatctcttaatttttgaatatgttcttcagtatccggatgcttataaaactttttaccgcctatggatttatttaaacattttttgctataaaaatatttacgtatgacctcttcttcatgttttaatgcatctttataactatcaaatgtttttaaaattatccatttagtaggtgtatcagtttttaagcgttcatttatatacttagatgacgttgtgtaagttttccagtttgtgggcttgtttttaattgttctaaattttttataaccgatataaatgtcgccattagaaaacttaactaagtatgtaaatgcgtctttatcttttattttagtacaacgtctttttatccatttcattgtttcacctcgtattcataagataatcttatttatacaagatgactgctgcatgtcgccatgcagattagactatatcttcatctttcgatgccggccgtttcgaatagcattagcttctattctacaccgctacattcatcacggttagtcgttaggcatttagttcaaaagaacatttagcacgggattgtctactagagaggttccccgtttagaccggttttacatgagcctgaattaaattaactcatacgcctggaatgcatcgtatacgtctttttctgttttagattgggcataattcagcgcatcagcgatttgccatttttctgcatcctcaatatgttttgcataggtgcgtttaacataaggagaaagtactttatctacattcgcaaaagtcgttccgccatattgatgagaagcaacctgtgcagtaatttgcgccataattgcagtagcaacgccgattgatttaggagtttcaatctgtgcattaccgagcttaaatccgttttcaagcattccttttaaatctactaaacagcaattagtaaatggaagagcaggggaataatcaatatcatggaaatggataattccgctttcatgtgctttcataataaaagacgggaccatatttttggcaatgtgtttagacacaataccagccataaggtcccgttgagttggaaaaacacgagaatctttattagcattctcgtttaaaaggtctttattagttttatgaatcaatccttcaatttctttttcaattgtcattttaaactctttctaagctgcttcttaaatgaagctattaattgtgttttagtgtcagattcattatattcaaatcctctttgaagcatctcagccatcatttcctcttttcctaaacgagaaaattcctttgatttatctccaacgaagttagggtgaatattattttgggtgtaatcggattttaaataagtaagtaaattttctaaccattcaagataatcaacgccttgtccctttaagccagaacgattaaatttgtgcttcatttgaccttccgctgcattgcaaagattacagagcaatccacgcacctttcctgcttttggtccatttaattcatggtcatggtcaaggtgattagcttgaacatcaggatttagttctcgttggcaaattaagcatttaccgttttgtgcattataaaatttctgtttttcttctttgtataatttgccagtcaataacataataaaacccttaccttaaatagataagggtatttattatttcaagtattaaaacgctcggtcagaaaaagaaatttgggtttcaagccattcaatatattctgccgcggcttgcattaaatttccttcatagccatcgttattttcttgtgcagctaatttagataatgcatatgtaatgcgttcaccttgaaaagcggctttaggtttatgaataacttgatcaactcgttctacgacctcttcaatttcgccattttctactgattcagtattccacaagcaccaatacgtaattggcttatcatagatgttaataatctttccatcagaaagttcaatttcaataattccagtatcaggttctatatcatcttcgcattcttttgcaagttcacgaactttaaagacagtacctgcactaagttccggccaataattacacagccctttatcagcacgattaattctaaaccacttatctactgtaatcatgtcccatctccatatcaattaagtcatttatcgttggttcattatatactgtttcttcatcagtgtaaaccggttcttccggctctggctctactgtttcccatctagccgcccaccaaggttttatagcgtaatccattctcgtactgtctgagttactacgcgttcacgaggctcgactagttcaacagtcggaactgcataataccagtcagaatggtaagaacctgagcgagattcatttacagacacatgaacgttatgttttggactaaaataaacacactgacgatattggcatttaccatcttgcacccagtcttctatttcgataggtttaagataatccgaaaaatcgaaatcataattttctgaaaatgcatcatggtcttcgatgatttcgctcagaactgcatcaacatctaatttattttcaatagtcatttgtcaccaattaatttcgcaatttattaagttcttcgtaatcaatccaggattctagtcctgatggcaaatcagattcaatttcccaaagaagctcttcaattttctgaagacgatctaattcttcagctggaatagtaaccattgacggagttcttgatacgctaatatcgtaaatcatatttaccccagtttgaccatacaatcgccgtatttccatttagaaatagacttttcaccattagaataataaacttcgagtttagcacggttatttttaatttgaataaccttggctgtcatcaaagttccatacccatagtaaactgcgacttcatcacctacatataccgcgcttccgcggtagtcatggatataatcagttccttcgagcatcatttaaagtattcccgcaattggtcaaatccaccaatatgacttccatcaggagcaaatacttgtggcatcgtcaaaccaatttgagtatcacgacctagtttcgttagaagctcagcgattttctcatcatcaaaaacacctttttccggcataatgttgataaattcaaatggctgtttctttacagtcaaaagacgttttgcattatcgcaatacacacatttatggatgttgctatcataaccatatactttaaacatattattccttaattcctagtacttgtttaaaagtctcatcgtaatcaagactttggcccgtttgttctttatgtttgtatataatatcacttacttctgatagcatatttttatatgaacgagttaaagcagatttaagcacgctgtatctatcaggaaatttaccatgttcattataatacgctattgctaattcacggactgccttttcagcagtctccatatattctttacgcttggtcattttaatccaaaatattattaggcattggttgaacactcgcaagttctttaaagaactcagtagagtcaggtaatttaaccatttccggagcatgcttgctaaatttgtgtttacaatgacggcatttatattcaagttccggtttacgccagttaatcaattgaacctgttcagtaccgcattcaggacaattaggaacgtttttagaagccctttcgcgacgttcaaccatagccataatagcatcccaggctggaggtttaaaatctaaatcatcacaaccatgaatctttccacgcatttccagatcgtcttcttcaccagccataataattttaattagactggaattacttgaagctgcaatatcttctaatagacgctttttcatttcaatacctcaatagcattacgtaaaccatttgcttttgcattaagagcttttaacaatttggtgtgttcggcaatctgggcttcaacttcaaccagtcgagatttgaggtattcacgttcttcactcatgttatcaatcttttctactttaggctcttttacaactgtcttatatgtattaggattcttcagtttaattagaatacgtgaactgtataacattgaaccattatcttcgatttcgtcatacatttctactacgtccatgatttttaacatcatgcggagtttataagacaacgaacgaatagttttgttgtgcttattaatttctctagagttcatggtgccgagattacgtgagtaataataaggaacttggatattaattaacactgatgaaccacctggcttgtgtgttacttcatcagcaataacccaatccttaacatgaactgtatttgtacggtcatcgcctgcggtaaatagtttgcgagcatgcttaaaaagcatattcacttggtcattgaactgacaagcaaatttatcagcaaatttagtttcaggaatggtagataaccaatcagccaaatgggtctttttaacatcgttaacaatagtaaattcaaccaaatcagttatagatgtcgcagatttaatgaagctcggcttcataaagtttttaatgttatcgcgagctacagtagaagataacatacgagaacgtttaaaccattcaagcaaattgcctaacgaatgagaataagcgttttgagtatctttgcagatatgattttcctggccaacatattgaaggaaatcacgaagaatattattgattactgctctgtgtccgatctgataattgcggtgtttagtaataagactgtcaaaataatcaatataatgtttacgagttttcatgttcttctcacttggttaatgatttatactccgagccatccttggctttaaattacttaattaactgtaaagcttgttcaagacgatcaaggcgattaacagattcttcccaaatccttttagcctgctcatattctttctgtgctttattagaaatttctaaaacttctttataagctttttctagtgcaataacttctggacgaatttctactggttcaggcgaatcgtcaagattatccattagttcctcaagggtagtttcttctttaggagtattcacaatttcatcacatttttgttggtaaatttctttatcagtcggtgagtacgcacatttcacttcacgaaggctaattataattttatatccttcccaaccacacatatttttgaaaggatatgtatgaatactttttacagtttccatacagcccaaagccgcctctaattgataagttatagtgctagcaattgagaaaaatttattaatattcttttggttagcgtttggtgtaaaaaatccataattcacaaaaatagctactttatttttatcaagctcattttcttttacgataatcatatcagaagccaaaggatgaatttgacgataatcgccataacataatttagaagctgattttagaatttgtcctttgaaaagtctgaaattactaatccaacgacgagtaaaaatattctcagggtcttctttattattaagatgataagaattaacatcaccgaaccaattatatcctactacatctttagttcgtttaatttctttcccaaatttactaagaatatctctgttgactaagtatgaaagaagacgagaacctttaaaggtttccttaatgtcatctttatctgtacgactagaaatttcacaaacttcataaataaatttgtcggaagaaacaatacttgcaccagtattattgatccattgattgataatagaaatcacactattctgactagacttaggtttaactttatcatcaataacgctattgaacgatttgatatattcgttacgagtcatattaatctcctcagtagaaagtaagaacattataccacatccttgtggcaaagtaaactagttcagtgcatttagtgcattgttcagtttagaacgttgctttgtcagattttgaacccttgactgagcttgttctaacaccttttcagcttctagcacttcattggtcgctttaacgagttcatcatctactgccttaagagacttctcaatcgcatcggcgtgccatttttctacaggtttaaaatttgaattttcagtaggaagaaaactcactttattaagtttacatgcatccttattacctgagctatacatccaaaatttaggatcgtttgatgagtaattggataaatttaagatatcttgcacttcctgctttttctcttgcgggacttcgtcctttctcaaaaaatcgtatttaaatgaaacgatcatatcaagttcatatgttgttgtgtctaatttaaatcgctcaaaacgaggtaaaatcttagactgaacagcggcaacaacatctatatacttaaatgcttctgtcaactgcgatttaaggcattcgcaaattgaaagagaattttttgtattaggtttaaagctaattcgtgcagttctgttattttcttttaatggtcttacttccatctgaagagtataaccatcaaatttcagattctttaagttaatatcagaaccttttaatcgactcgcagttgataaaatttgctttaattgtctacggaacagagcaataaatctccattcaatacgataatgatttggattgaaaaatccagatgataaatcgaccttactttgaccaacaccttgaacaaatagaggatttttataatcaatagttttacagaaattggtgagttgctcacgagccgtcatttgtgtaatatatcccgctttactaaaattactcacccattcactgctatttagatatttaaagtgatgaatagcacgattaactttatcagggtctaaattattttcgcacaaaaatgtcataacattacgagtatcgctggcagtacgaaccatatcttcaatttgagaacgagttttcatggtattccttaagatttaagtaaatcgacaattttaattaacttttcacgctcagatttagctttactactcaatccagatagtctgaaaatttcatcatcatattgttgaatagaaatattcagctcttcaatctgtttattaaaataatcaatttgttcagagtgtttttcgttactacgaactggtacaggtttcgtaggcaatttagttgaactggattcatccgggcgataaattaaaatacaacttgaaccaatagggcattttgcaccagatgaatattctaatgttccagcttcttttaaaacttcaaaagctaaacagagatgatgccccatattgacataatctgtagagcgagctctgatgtaataatcatcgccacgagtactaaatttaaagcatttaaggtcttctgtattattggtcttaaaaatcatttgtttatctagacctttagctaatcgagcgcctaatgctaataatcgtctttgattttcccacaaatccgcaatcatttgatcgaatgataattttggcatcagtcggccataaaggtcatatcctttattataattacgaaggatttcactcgcattaatacgagataatgctccaattttattaagggctttcataatgcgattagataaactcattccagatccgtttgttcgctgcaaatgtttttctaatccaaatccaatatcaactttaaacttatctaaaatttctgcatgaacatctctgtcgataacattcaaatccaaagttgagttaaatctatgaaaaaatttatctggctctgcactgcgaaatacagtccattcattcatcatttttttattaactaaagatttaattactgcattgacattattaattactactgacatattttcctcactcaatttcaattttactaaatatacagaataagatggaacagactatataagcaccacacacagattgaactaataccattccaaagaaccaaacaatattatcaaacaatgtctgttttacgtcgaaaggacgtaaacttacagtaatattatcacctttttctattgaagaatacatctctggggaaatatattcactaaatctataaccgtcttttagttcatatacggcaataaacgataaactagacccttttccttgtgttcctgtaatggtattaactacagtaacatcataatctttatagtgcatataatcattaattgcgtaataaccatatgcaactactacacataaacaacatatcaataaattcaatcttttaattatcaactgtttcataataatctcaattaaaagggcttagaaccattataccatccttggtataaagcggttatgcgagtaccgtctttaaccgttcttcaaacttccgaagagtattttggcgttcagctctttgctttttgtaagtttcaatacgctctgaaatgagagagtatcgttcatttactgattctttcataaaatcaggaatttcacgagaagctttaatctcgtcaaatttatcaataacagcttgctcttcagcaattaagttatcatacattaaaatatctttcttgatgaactcaatatcttcttgagttacacgagataatttagatgctttatcctttttgtactgttcgttagtatcacgagaccagtgtaatgtacgatttttattcgtattcttgtaaatttctacaataccaatctcatcaataataacgatccaattccaacgggatttgtaaatttgtcctccatcaacagtgatttcacctccgattgagatgtcattaaagaacttgctttgtgcctcagatttaaatttaccatcgttgtaatttaccaagttgaaaatatctttagcgttcattttgtgttcctccgtagttgatagttgtatagtaccacagaggaacagtcttgtaaaccactaaaagaaacttctttcacaattttttccactgaaccatgcacttaccgctttcttggtctcaggagcagtgttatccataaaccattcaaaggcagcctttttatgattctggagggcttctcgggctttaatctgctcacggtctattaacactaacatatgagcctttcttgtcaccatgggcttcttatgattttttgaatactcccagtcatttgtccatcgcattgtcgttgcgaactgaaatactgcttctttaattttagtttcgtaaatttcacgagcctttgagtataacatcactacctccattcatcagtttaattctagtcatctttttaatggcagtccatataatctatttctgaactgcctttttgtcatagaagtcctcttatgaattatttcaaaagagtaacctcagcaatttcttcccaaccgtttttgtcggtcataataaagtcagcaagataaagagcagtacgcagtgaaacattgcgtaaacgattaacattaactttcatccatgataatgctttataagtttcttcatcagaaagaccgcgcttttgcatcatgtcagttgaaagaataacatcttcaaccctgaccataatttcttcattagtgtgaacacccaaatccaaataaaccgagcgggacactaatgcttgtaaatgtggagcaagtttagtaccacggtctaattcgcggtcaatgtcaacgtttgtgataaaaacaatcgttcctttaaattcaaactcacgctcaatgcctttttcttctaagtaagaagacgcagtgctccagcagactttacgggtctctccagtgtccagagcggcttttagaagattaagaatgtccatatcagagaaaacatctacatcatcaatcaaaaggacagaattctcttcacgattattccaaagctgctcataaagaccaataccagagattttaccattaatgcttttatattcaatgtatccaatatcatttgctttatttaaagctttatctaaagaatacgttttaccaatacctgctgcaccagagataattaatgaacgaatatttccgttaataataccattcgtcatcattcccataacattaaatcttttattaatgcgggttttcatatcttcatacgattctttaacttcttcaacttttacaccatcatatgaaatatctgatttgtaaacccaaacaccgcgacgtttaccgtcaatttcaacaaaaactttaccatctccttgtgcatctaccggagcattatctgggaaccattcgcctaagagctcaaaagttccatagatttctttaccgaagtagatacccttattgatagttacagttttcattttattctccaaatccgtatcagttgatagttgtatagtaccataaagctttatgcttgtaaactgttttgtgaaaaaattttgaaataaaaaagggagcccgaaggctccctatcatttataataacttcggtggttttcaagataaaccctctcaaggaagtcatcccaaaaacacatgtctactttttgctgcataccgttcttagaagcttcaatggatgctgcttctacttgatcgaccacatcttccaaaaactcttgaacagttttaaatggatgtttacccagcttcacgtcgagaataaatggagcgtcttgaagtggataaactaagtcacctgttttgtaaatttccaatagttggagtccaccacgacaagcatgactcagagctttccagtcaatgccctcattcgcttcagccttacgagcgcgttcgccgtattcagcatcaagtttattcaaagattgcttaagttcaataagagaaagcgttgtttgatatttacgacccaacacagtgtagaacgtttgtgggcctgttttctcatgattatggaatacccattcgcagaactcgttctctggaagacgatgcttaatatcttcaactttagttcgacgctgcttaatggaaccgtcttcttggtaatcaacccattgctcagggatttgattaactactttcaatatatcacgtaatgcggccaaacgagaacctttaacaccgtatttagaagcttgcttgcgaacatatcctaagtaggatttcatgttggtcgtataaaaacgagaacggttgtcttgaataaacttccatacatcaggcaaatcagatttaactactagttccggtggagtgtggagcatatccaatgctacagtttcaccatctgctgctaatttaaagaaatacttaagactgtatagttcatggtcaatatcatctttagtgtttttagatgatgtgttgttagtgtttttactcatatgctctttaacatttccaataagaatatcgcgagcaggaggaacaaagatttctttaaaatctacatcagattctggagtagaagttccataaagatgactaccaaaatagcttttcattactgttttcatcattcagccttatattcaataacaggacatactttagctttacgcgcttttaaaaattcgacgataatagatttcttgggttgaataggaggtaaacctttatacgccctatcaatattttctacatgtaaagcataatcctttttccatttataatctttatatttttcatgcagttgtgcaggaataacaaatgaaccaataataagtaaaacaagcaaaatggcaagtataaatgctgatggaataagagtccataaactaccaaaaataagccatttctgcatgatttctgcacagataatagttagacctgcgagtatagtacatccgaaaaaagaaacgaaaaatgtagggataacaatagaccaaaagtatgcacacagtgtcttaggtcgtttccattcatcattaaacagtttgaataatttatagtgccaagagttttcattaataatcataattataatcatcctttcattgaaggtgtaacagttgttaaatacttaatcatagcttcagcttctgattttgataatgaaatttctccattgttttgacgaatagaaataaaatccggatgacggtcaccaccagcttttaaaacacacatataagtatcagtttcatcttcaatatctgaaataattgaagcagttccgcatgaatgtggtttttgataaatcaatgcagcttttcttccaccgtttgactgttcataaacttttaacacatcaaacaaatcgcttcttttatcaatagctaagatgttgttttcatcttcaatgttaaatccttcggatacttcataaagtgtcacccataaatcacctatatcgatagtagcatttccttttccacgactttcaagaatgtgacaaattttcttaatttcatcataactcattttaataatatcatctccttgactaaggaagatgtcatttttaaattcaacgcgaattaaaccacttccacttgaaataaacatatttcctcactttgaaatcatagttggaatgacagaatcaagataagtctttagcgcaatagcttcgtctttggtaaatgtgacaatatgcgatcgaaaatcatcaatttgacgaatagttaagacatctccatcttcataacattttgatacgtttaaaacagtttcatcattctgattgcaagcgttagtaataatagcattgcaatttttaaaccattttaaactatgttttctttcattagaataataaaaatatttaatcttatctataaaactgtcccaatgaataactgataggcatattgactcgctttcaatattaaatcctgggcatgaagaataaaaatgaattttatgctcatcattaatgcttacaattttatcagtataaggattttcaatttgggttaaatgaatgatttcactaggcgtaaaatacatcatatcatcttcttgcgtcaaacgatacatattatttactttttctatagctaattcaccaaaaagtgaactaacttctagtactaatcgtttcatattaatcctttttattggcatgaatttgttttaaaattttagagtattcctttgtatcagatttacgtacaatcgatacactataaggcatactatcggtgtcttttataaaacgttccaaatgacactctaacaaaatttctgggttataaatcgtgtacatcaaattacctgttgctccacgatattgacagatttctactgattgagcgtcattccacaattttgttaagactaaatcacctacttctaattttggaaagctcacattattcaccaattaaagtttcaattaattctcttaacttaaaagcttgttcacttgtcattacatactcctttgaataatatcaataatattgttcaccagattataagtaaacattgggtaattatattgaatcatcacatacgcaacaaacaaaactttcattctcttctccttggcagttgacaagattactatatcataaccttgccaacttgtaaaccattaaatgacgttttcaataaaattctgaagctttgtgtgagcatcaaccataattttcatttcttcctttgcgaaagctgtacctctttctcgagcagaatactcatagtcagaaactgcattagcatattcttcaattagcttcattaaaaacatctgcttttcagttttcattattccacctaatcatttcaagatattgaactaacttagctttggatttatccaaatcctttttagctgcttctataccatcgtatgagtatccttcacaatgctcaactgccaactgatatgaatctatttcaatatcacgtgctaatttaatgattttttcaaactgttcacgtgttagcatacttaaactctcgtattatgatcgataatttcatcaagaaacatatctaaagcttctacagcattatcaactttagcttcaaatttttcaatacctttatttgcaatgcctgacgaaaaccaagcaaagtcactaagttcctcatctgctttgcgaattaaagctaccaattctttaattttatctgcttgttcaatgctaatcattattccaccacatatgaaagagagaatattgcacacgccatgtgagttgcagcttcatcacacatatcataacgtttcttaagaagttctacaagttcttcactagtaacttcatccatgtcgacgaaaaaatcaccattaatgatgacgtagatatttccttcttgattgagtgcttcaattttcatgatgttctcctctttatccgatagttgtatagtatcacagctcaaatggaaagtaaaccggtaaaatgaaaaaagtctcccgaaggagactaatgttattcgagggaaagaagatatttactctggtaaaacatcccagtaatatcatctatcgtgctttgaatggctggaggcatttctttataaatgctgttagattggtctagtatgcgatcaatcattttaattgtgtcggtaggaagtttactggcatctggaatagaaggcgtgtattttctaccagaataccccaaatattgctcaccaaatttatcaatcaaatctggcaactcagagaaaataaaatcgtatgctttgtgtctagcataacttttagtttcaaaatgtgcagaatgaaaataagcttgtgcagccattaataaacctaagtattcatctgcctttgaaggttttccactttgtgaaaagtcgctgaatttcattcagtctccaatttaatgttcataattctagcgtatgattgtgccatctccgcgcctcgctctatacattcgaaatcggaagagcacgggtcatttttataggtcgttcgcataaaactatagaactgttcagatgattctacgcttttattttcaaaaagcatataaacatgtctaataccagattccataaatttatcaaaatgaggatcgacattcgcttcaatcggtggagataaagcaaatgctaatcctagcatggcaaatagtgccgttgcttttaaggccataaaggcctcctatcatttttgtcctgtatttactttatgccgatgcacggccttaactttatcaaggtatttttcaaaatttcgcaatctagtatagtctgccggagattggttgagtgatacttctcgacgcaaagctgaaatgatatttccaacttccctacgaatttcatctaattgaagaacagtaagattgcgaagttgcttttcagttaattgtagcatatatacccctttagttagataaacctatttataacttttgcactaaccgagctttttagttaattcattccagtgttttctacacaaagaaacataaatttcatcaccaatacagatttgattaccttctttaactggtgttccatcttccattaatcgagctgtcataatcgcttttttaccacaatgacaaactgcttttagttcaataagtttatctgcaatcgccaaaagttctttagaaccttcaaataattttccagcgaaatcagtccttagaccataagccataacaggaacattatatgtatcaacaattcggcttaattgatgcacctgttcagtttttaaaaactgggcttcatctacaaatacacaatgaatatctttttgtgcttctgcccatttatagaactcaaaaatatccatatcatccgtaataatattcgcttcctgtttaattccaatgcgagaaacgacttcacagacagaatcgcgagtatcaatagcaggcttaagaactaatacacccattccgcgttctttataattgtgtgcagcagtcaaaagagaagcagattttccagcattcattgctgcataagtaaaaattaaactcgccatcttagtccttagttaaattttctaaatatgtttctaaatcattttcagctttatcgatagattttactaattcgtaatatgtttcggcatctccgtattcagaagatatttcaaaagacaaatccttttctaaactaataatttcaccaactaaaaataatatttcgttcttttgttcgcgagtaatcataaggaatttatataattaataagttcttgttctttatcgtcgaaatctttacacagttcttcgtattcgtcggtattaaaaggaccgcattcatcacaaactttttccaattcgctatttttatccataacttcgtgaataagagaaaatagtctgtctttttgttctttgcttaggctcatagtatgtcaatccccaaaagttttaaaatgactcgtttctgattcataaccgctacgattgaatgaccgttggggtctttttgacctgatccaattataaatcctttttgcgcagaaagttcaatcaaaacatcaagttcacgtaataattgatattttaaatcatcgttcattttggtttaccttctttaacgaaatcaggataaggataaaatcctgaataaaatccttcacctttatgattgatgcatcctttattagaacaatagcaccaataatcgaaatcgcaagccatttcatcattacataaagcaaaaacaaccggccattcacacttttcgcagtgggcatttttaagaatactagtttggctcataaccatgtaacctttaagcaatattcttctacatgttgtttacgacctttcttatcaataaaggtatattcaacgaatgttccaatatagtctttatctacatcatgtggactattaattgggcatttagtacggcaaatgcgttcccattgacgaataatttccactttgtttttaggatcaaacggatgcgggtaatgtactttcataatccaccactattaaatcaatatcaggagtaaacatgtcaattaatttagaaaccttatcccaatcaccaccagcaataccgcaacctatgcgtggaatgtaaattactggtttaaacaaaagggtttctgcctgtagatttaattctatcatgcagtttactaaagcaccataatcaagattaggacccggttcatattgcgtatacaggttatagcatataccaaatcctgtaggattatgtttaaaaacaatagacatatcgcctaatttatcacgagaaccgtactcggtagtggttttatctatttctaaaattttgggataggctcttgctaattgacctgctacgccagagcccattgtgtggaagcaattgcacccgtgcgcaataatattaccttgaagaaatagggcgacaatatcgcccttgatatattttacaatcatctagtactcaatcctcgattataagaatctactaaacggtcaaccattgaatgacaagcggctttatctttctcctccgcaactgaacattctaaggtattccactttttagcatatcgttttaacaatgtatcatttttgtatctgcttgatttatctctttctccgtctttatatgcatatattaatttctgtgcaaattcagcttggcatgctttatttttcccgcaataatccgcggcagtacgatttacatactctctaatttcagtatatgatgtatctgctgatgcagaagcagaaaatgaaattaatcctatacataaaaccaaaattttagtcatttactatttccaaaagtttattatttttaaggtaattagccttttctaggacttcagaagcatatttagaacctgctttaacattccatcccgaattataagaggatattgcttttcttatatcgcccttatgtatatttaaccaataagaaagttcaatgtacgcccaggaagctgaattggaccgtttattcaacattctttttatttcagcatcggtcatattataaccaagttccttaactcttgctcgcatagttggcaaataattttggaacattccataggcatgatgctttggtttagattttaaattaactccggcagagctttcttgccacaaaatagcagccattatatgacccaatccgctcttgtggatatttttgtgtgttttatattttccatccttagaaaattgttccccgaattgatatgcgtaacgcatgttatcgagttggacattactgaaagtatgctcggagctatgcgccatcattgaaatggccaatagaccagcgagtagtgcttttctcatgcttacctcattgagttttaattactgctttagaagcctttcctggtaaacgacgactgttgataattgccatcctgcattgaagcgacgggtctttgaacttcgcattaggtttacaaactgtaaatccaagccaaagatttccatctgtaatttctaaacgtccaggacggtattcaaccccatcaataaaatcctcgtcaatgtcaggacgcggaggcatactcaggaattcattaacttctaaaacatggtcttttattttgtggaataattcaaaaacatatgtctcatcaatctcccgttgaattgcacgatcaagaagatgctgagaatattttagatgaaacgatgagacccctgctgcttttgatgcctcacgaatctcattgttaatttgacgaaactccgactcaaagtgacgacgaagcttatttcgacggataaaaacttctgtgttgatagtcatgttattctcctcttaactgatagaaaaattataccacagtcaagaggaaaagtaaacagttattctttaaatctaatcaatttattcatagactttgaaacttctgcacggacctcatgcaggtttttaagctgttcaagacgttgctcatagtaagcaatttcatcttcttcaagacagtcctgtgaatcttctttaagataacgcgcatagtcctggaaagctttacggactacttcttggaagtcatcaagactttgaattttcttaggagcaacagatacacgacgaggggcagtataatactcataaccaaaccctgcgcttaattgagccattaatatttttcctctggttggaacacagcacgacaagcccacatactggcttctttgagtttcgttttagcaatagttaactgatcgaggctttcagcataattcttcgcgaattcacagtcttcacaattatctagtgcttcccaaaattcatcgtataaagcgtcaaagataagtcctaaacgaacttcagcatctttgatagcattcactttaccgattttctcttcagtgtgtggcttataacctttaatatcttcaatcatatttgacttcctcaccagtacataaatcatattcaactaaacgaataggttcatgaatgccatatccttgaacagaaatttctgtcgtaggataaattccatcaatatcacccatggtccatgcttcattaaattgctgttcgcctgaattactaaaccactcggcgaaagcatttaacacatctttagaaccttcaataattatctttgccattacaagctctcagtaaaggtacgagcgataacgtcgcgctgctgttccggagtcagagagttaaagcgaactgcataacctgatacacggatggtcagctgcggatatttttccggatgcttaactgcatcttccagagtttcacgacgcagaacgttaacgttcaggtgttgaccaccttcaattttaactgtaggctgtggttcaatttcaatttcacgggcatgcaaaccgtagaaaatttctgggtctacaaaagagtcctctttaaaggttttagaaacaataattcgtgcttgaataccatcttcaaaataaatagtacctttatgtgtgccttcaagaatttgatatgctttcatataacctcaattagaaaataaatttatccaagactgttctttaattaaaaatggctcagaatcatatgccattaaactttgggtgattagtcctttaaaaggtccatcaataaattccatggtaaaatatggaattttattcattaatcttgcattaggagcagtacataaaactctgcatcctttgaatacacctttttgtaatttgtattgcttaggataaaattcgctcaagacgttgttatttgccaaaatttcaaaatgattcaccaatttatttttaatagtttttggcgaaaaataaagatattcgaaaagctgtgtgtctgtcatcattgcattccgattacgaaaaactgcggacgagtaataccaccagtgcaacatttactattgcaacagtattgtacagtttcaatatgaatatcgtaaattttatccatatcgggagatttaaccggctcatcgattatatacaaaatccgcgaaagcgataagcctctgaacttgctgcctctattaccaacaaaactacggacagaatcagtaaataagcggaatcgaatatcgtcactagaataacgagaaaattcttttttaatgtggcctgcagaaattttagcgtaagctgaagtattagaaagaacaataactgttccaccatcatacagccaattagtagcaaagttagtcacagcagttgatttaccggattgacgtccaccatctagtcgaagtgtgcaatactgtttgagtaagtcttcaaatggtaggatataatcgtttttacaaatttcttctactctagcatcagaatggtatgtaaaagcattcatcagggatagataaggaccagttaaaaatgttctcattttattctctctaaatttgggccattccatggcacatgaattgtccatttctctgtatttacccattaccgcacttgggctcgaccttattacaggttggcgggaatccctcatagaatcatgaggtccagcttgttcccatatttcttatttgcttatttgaatgatttaacgtactgaatagagcctttgctattcacgaaagcgattttaccatttttgttatacatggtagcagtacgctgataaccataagtttgtttaccagattgataaccaactaatgcaaaattatcttcgcccattttattctgtttggcgcggatacgttcatgaccgtgcgccataagaaccttagcatcgccagttgaaattgatctacgagttttttcatcttcaactgtattaacaaagtcgtcaaatgaatcaaatttagcatgagatttattatacagttttccatctactgcataattatatccctgtacatccatctcaacttctgtaccatcatccaatacagcagtaattttttgaccttttttaaatttcaaaagatcagtaaaagattcagcaataatttgagaattaatagctgcttcagtgataaattcttgatatgttttcatatgtttcctttaaatgtaaatatttttgccgtagtatttataccagtgtggcttcattaaaattttttcattgagtcgttgttgactcaacttaatagctgatttgcatggattataatcatttttccattctgctggaatatcgctgatgtcaggaacttcaatatcttttatactgaacccacgttttaagcattccgttataatgtctgattgacgctttcgcaaaaattctaacttatcgtaaaagaacgtgacatgaccagaacctaaaataaactcggaagatattttaaaatctttaacccgcttaccatttgcaacatgtttacgaactataccaaaaacacgcggcagctcacggtattctgcgattaaatgttgatcagcaagttcagatactaaagtcaaattaatacgagtcattttatccctccaagtaactgtgaataatactatcacaattctagaagaaagtaaacaactttatagatttttatacgcgtcccaagttccggttctaaacgttgcaataactcgttttgcacggttaggtgtttgattataccatctacttttagctaagttaactgctgcttcatcccagcgtttttgctggagcatgcgtaaagaattagtaaatcctgctacgccggtttcccccatttggaagaccatgttaatcaatgcacagcggcgaacagcatcaagagaatcataaactggttttaatttagcatttctcagaattccgcgaacagcagcatcaacatcctgattaaagagtttttcagcctcatcttttgtaattacaccattgcaattacgcccaatagctttatctaattcagatttagcaacacttagtgatggacttttagtaagcaaatgaccaatgccaatagtgtaataaccttctgtgtctttatagattttgagtctaagaccttcatctatacgtaacatttcaaatatattcataatacctcctaagtatttatagaaggtatttataaattaaaagagactgttcattattcggtaaagtgaagggcccatcacatattgccactgagtacgaggaataagggcaaaagcatccatctctggaatcataacaccatctttattttcaaaataagactcgcaatggcaatttctaaacatctcatgctctactggaatcgtatagtaaaataactgtaagtctttattactagaatatttaaatacacctaggtcttctagaaggtctggattataattgttaaaaccagtctcttctgagcattctcttcgtgctgcatctagcgcgcttaaatcagaattttctacacggccctttggaatatcccagcgatgtgccatcattccaggcttacgagaaccagtaactcgtcccataaataaatctttatcttctgtcataaagataataccagctgatagtgttttcattttaatttcctgcattcagtgataaagttatttaaattttgagtatatttcttttcatcaaaaatcttttgctgcctacgtaaccgccatggcatttcaatgaacacgcaccatattcctgatagtactgctgctgtaaaaatattaacaagcagagtaaaaagagcccaatctcctattctatccattggattttttccaaagaaataaaatacgaatgatgacacaggaagactaatgatataccataaaagcatattcttgcctgtaaaccaatcagcgttcgttaacttagcacgaccgttttgaatacatacgaacttatcatctgttacagtagatggcttaactgcttgatatcccattctaaactccctaattaatcgtttctttgtatcttcagaacaaccactccaatcaactctatcaactgaaatgccatcatccccatcatctaaatcataccagcgagtttttaaaatcatctgattttcctgcaatcactcacaaactcttccattgattctttttcaatataagacatgtagctattatattcttttaattgtattttgtaatctttttttctttgccaatttattttaaaattatcataatgaaaatataaaataataccaaagaatgaaaataatgaaattactatagtataatgaagttcgctccaaacttctattatatctactataccgctgacattactgcggatgtttaaaataaaacagtcaattaacaatccaataagactacccgcaagagctgcagccaacgccacagcaagaattaatagtgcctcaggaaacgaatatttgactttatttagttttggcttttgcatcgtgattccttaacaaatttcataatttcatcaaattcatacgcagcaagtttaagctgatgttcttttttaatctttttgcaccgggctttccaatcacgtacacgtttacgatagtgtcttccttgataccagtatcctacccaattcacaggtactaataaaagcggaactaccaatggaagaattagtgttgctccaaatattacaccagattcaatatcagtcataacgtctataaccattccagcaatcagcaaaatcacaaatgatacagctaccacaggacctattaacacatcagtagaaattagctgacgctttggttcatacttcacaggtttacttggaaggtatagtgatggctttgacatattctctacattccttaacaaatttttctaataataaatcgctttcaaaattgggattttctacgaatttatcaaaaagatcatcaacaatagttaagatattctttttactaagaatacgcttattttcatattttgtttcagaatcaactataagagtaaagaaatatttctttccctgaaattttaccgtagtatcaatatagaacaaatttgacttttgtaaattacgtttaaaccatgcatcacttaaactataaacgccaagataatcataatcgtcgtttaaataacaaaccgtccattcaggagaaatgaaatcagtaaattcaacatcaaaatcacacgtcaatgaatgaattgattcaatactgttaatgagtattccaggacgtattaaagactttttacctctagaaaatcttccggaaaggctttcatcagtttcgtatgaagacccccaatagtaattacgtccttctgccatgcgtttaagagcatttagtaattgatctggaacatcaacctgtctttggaactcttcaaacattgaattgaaatcacttcgcattttcattttcattcctatttactccaagtataaggggccgaagccccttatcattatttcagagaattaatgtattcctgaacatcggcagaggtagtttcaaccccagaaatattaccgttaaaggtttcaactcgagcaagagtatcttcaatatcaaccttagtcagtgctgcaatttcaactacatcatcggcagtactaattccaagggcatttgctgcacgagtttcacggatatattccaatttaaccgcaagttcttgacgagcatcatctaactcaactactttcttggcgatttcaattcgcatttcagcataaccgtcagctttagtagtcaactgctcagctgttcgacgatatagcaagccgagtttagcgtgcattgttacatcttgaccttcagaaagaagtttacgaatttcacgctcttttgattcggcttgtcgattcttttcgacaataagttcacgaatacgcttttcttcattaatagatttaacagaagcagtttttagatctttaattttatcaagcagttttgctgctgcagcagtatactgttcttcaacagataaatttttagccatagcagaaccaagtttagtgcgaataaattcaacaattttcttcagtgtgttcatagtatttccttaggttgattaaaaataaaatctgtggaagaattatatcatactatttaagagatgtaaactatttttaattttacaaattcgttcagcttcttcaacggcggcggcgataatgcttttagctataggagtactaatactagtagcttttacacttaacacgatttctttatctttactaggccaaccccatgatttttcaccatgagtgcctttaattacagcagacacctcaagtgagcatccactgtcacatgtttttacattaacaacccaagggtcacttttctcaaccgatttctcagccggtttatcccagtaaatattaagaatacgtgggacatcaaatttagcagggcaaatcttaactgtaagaccttcgctttctagccaattaataagagggcgttcatacatgcggcgatgtgggctttggactcgacaagccttgtgcccattgcttgcggcttcactaagctgttctaatacctgtttttgcattattgataagatatcatcaaaagatttttcggaagtttcattcagttcggtataaagagacataacggttttcctcaaattgcaggctcataatatctcaatcatgagcctatgtaaacttatttcatattattgaaatattcttctgcgatttcgtcgttatcgtggtaaactttagaagacagtttaacataaccttctgctgtgaacatgttaatcacaacctttacagtataccactgtccgtcttcattacccattactgcgtaagtttcaaacatcggatggtcaggaccgataactttaatatcattcactgtacgaccgaaatcttctgaaacgcatttcataaagaagttgaacagttcgccgtaattatccatttcattctccaagttgtttttctgtatcagtagttgatagttgtatagtaccatggaagaacagggatgtaaatagttttgtgaaaaaatttttaaaaatttttagggaattctagggcagggaggggcaattaaaagataggataatatattataaagggtataaactaaatgatgcctagagaggtccagaaaggcctagataccaaaaagccccaaccttttggtcggggttaagaatgttatttgatttgtttagcagaccaaatgcggtctttaataattttttgaatgtcttcaacatactcaagagagtgaacatgtggattatctttgaaactataagcacgggctaacttttggccttcggttttgattactaaaagctctttaaggatagcttcatatttagagataattcctttaacaatatttttttcttgtgcaactttaggatctgctttaggagcaggtttacccgaagcctttgcaaaagcagcgccagtagcaactagacttttccaggccatactaaccgcatttcccgtaaatccttctgctttcatgtcgcgagcaaattggaatcgtgattcgtcagaagcatctttataggaatatttacccgctgcaatggctgcttttgcgacagcttgaatttcggtgctagatgcttcatttaacaccgcttcatttaaaaattgagcatatgatttcatcttatttcctgttttaattcgtggatttaatatactactgtatttatactaaaaagccccaacctttcggtcggggctaagccttgcggcaaccttgtcggggttccacctgctaaggcaagtgtttgtacgaaacgccgggattcgaacccggttattaagcagttgacgctactcaatatttttaaaaggccatatctcgaccatatccgaacgttccgtcaaaaacgctactcggcttacggcaaagatatttcctcgaatcgataattcggtgcgccgtttcagctgtgatagtaaagaaccagaacacagtaaaactgtgggaggaactatactccagggaacatcagtccgacgacttaccggtagcgacccggtttcttaatattcttttaaagtatcaatctgttcacgacgtttacgccataaatcaattgcttcatacgcagattcagcatttcgaattagtcggcatttgtataaagacttatgattttgatattgtgtagataacggaattttatctaaaaggtctttacgttcaaagtattcgtaaccatctaagccaaatgaacgatttttaagaaattgccaatgaccatattcgttttcgacataaacataatccgcatgttgataaagcaaattaattacacgttcagaaataacagtgtcattgtgattaaaataaaatgttaaatcatgaactactaaataaacattacctttcatattttcctcacttaattggtcgagacagtagggatcgaacctacgacctaggacttagaaggtccttgctctacctactgagctatgcctcgtatttggcggacgtgataggattcgaacccatgactacgagaatcacaatctcgagttctaccaactgaactacggccacattaatacctactccaacaatcatgatgtcttcacacgaaattaagagaagagtgatcagttcaacccctataatcgcgtcaagtagatattaatgtgacagttgtcacaaatttggcggacgtgataggattcgaacctataaccaatcgcttaacaggcgatcgctctgccattgagctacacatccaaattggtggggagtgatggagtcgaaccacccgagtcgcaatgacaatggatttacagtccacaccgctacctctacgggataactcccctaattcataatttggtggccctgggtggaattgaaccaccatctggcgattatgagtcgcttgcttgaaccttccagctacagggccttggtgctgattgacggaatcgaaccgccgaccttctcattacaagtgagttgctctacctactaagctaaatcagcaaaactggcggaggcgataggatttgaacctatgagtcgccggagcgactgccggttttcaagaccggtgcattaaaccactctgccacacctccaaatatttatatattgttaatttgatttagaattctttttgcttgagtatgacttacgccaatatgcttagcatatttagataattcaccacgcttagaaaaatcatataatttagaaatttctgttcttctttttctttcatccgcagaaacttttgcttcgtttgcttttgctattttacgtttagcttcttgagaatgagttttaccagcaaagccattcttcattaatccatttgaagaccatccttttaattttccgttagaatgtgcctttttaacacccaatgaaattaattcgcgttgctgatctgtcataggataattatttatatggtcccatccaccttcacctccaagttttaaattatacacatctggtctatttaaaaactcttctgtgacaatatttttctcggcttcaagcatagattctttatcatcaaaatactctaatatttctttagaaaaattttctataccatatttatcttgggctctttttaataatttaccagaacccatatatccatcatctaaattttcggtagaatgcacaccaatataaattttattattaattttatttgttattttataaagataaaaatgcatatcagtccctaataaagaactgagcgtctcacgacgagtcataaattggagcggataatgagaatcgaactcacatcatcagattggaagtctgaggtaatgccattatacgatatccgcaaatttggtgcgagaagtgggactcgaacccacaaggaaatcattccgcagcattttaagtgctgtgcctttaccaatttgaccattctcgcgctgggaataaaggactcgaacctttgcatcctggaatcaaaatccagtgccttaccaacttggctaattcccaattattaacaaaggctcttaagcaagaacccttgatgatagagggtattaatcagtgcgatatgagttaataataacaaataattcttaaagcatatttaccatttatgataatacatatttacgatgcattcaagacccaaaggattcttgaaaatatcatattcaagaggacctttttctgtttcgataaagaaatcaaaatttactgtattaaatttacggtcttccttcactaatttaacttgtgaagatgaacggtcaatgtaaaccttttcaacttcaaaatatgttaaaatgccataatcatcaatcaaggctttagctgcttcttgatcatatttatatccattttcaatggatgatactttcgcataaagaatcattatcaaccttcatcaacaatagtgtgcgtattggcatttacaatttgccaccaatcaaagcgattagaaccataatctggtttgttttcattttctttgataatgtcacggagttcatcttcagtggtagctttcgctattaaatcagcatatccaccacgaggataataattatcacctgcaaaaagtaaaaagtttggtttaatgttattgaactcttcaagagtaataacttttcctgacggttgaacaatctctacatatttatatcccaatttttgagcagcatctactgcttcaagcaaagtatcatgagcccatccaatttgacaacctggcttttcagatggattagcctgataatccgcatacactttgtacattctattcacctttagaaattttatccataacgatagcaattaaaccaattaaaaatgctactacaagtgaaaaaacattttctgctgtagtcaataatccgcatataaatccaacaaacattgaaaaactaaaagcagaagcagaaattgcaatagcaacatttcgaattaattcacaacgtttcattttattctcctcagtagttgatgagataatagtatcactaccccatctaaaagtaaacttattttttacgaaaaattgatttattttctgctgcccatttttcaataactgcagcaggaccagtaacaacaattttatcaccgtaatcttctgcggcgagttgaccgaaattatctaatgcatcacgaagaactccataaggcatttcacccattttatctttcttgccagtgtaaataaactcaacttttacatcagaagattcagcgataaactctttgaaagttttcattttgatttccatttgattttgttttgatagggtaatagtatcacaactaaaaccctatgtaaacaactttgtgaaattattttaaatcttctaatcgtttcttcatcttagaaccatttttagcaatttctcctgcatcggagcataatgctaaaagtgctttaactttagtttggtctcctttaaaagatgaaggatcgactgcagcagcaagttctttaatacgagagaaaagacgctcagcttcagctaaagccattccaagctttacttccataccgtgggaagattcagtgatagtagtttttgtagcaaactctttgaaagttttcattttattttcctaattaattttgatgagataatagtatcactacctcatcagcatgtaaacaactttgtgaaattattttaaatcatctgcccaatcgagtttaagaggttctttgtattcacgatctaatacgaccggaatttgtacatcaccgctaaatgataagggcccaacattataagacaatgttatatgcggtgtgtaatcatcaaaatcatgtgtagcacctagtgcccgcgcatacatgtgtcgacagcgcagatattcagaatctaacacaagtacaagagtcgatccatcttgcgttttccatacttctaaatgtccagaagaagctacttcaaaacttccactcgatggaacatacggaacatttactcttgaataacatatggtcgaatgaattttttctctaggaactggattaggaacacgtaaagtgcgctggagttcttccagcgcatcaagtgttaattctgaaaacttagctgctacataaagacccgttgaaaagtctttaaattccattattcttcatcttttgcttcatcagcagattcagcagtaagattcttgacagcttcaacgatttcttcaactttgatagtatcgccagtgatacctactgcacgagcgatttcagccaaagttccttgcagaattttggattcttccatcagacgagccgcttggtcctgcgtatcaagaatacgagatttcagagctacgatttcagcagacagtttttgttcaatagtttgttcagacattatagtacctttagtgtatttttaattttagaaaaaagttcttcaagagaaccatcgtttgtaattactaaatcgccatcacgaattggcaatccagcttctgtaatatgagtatcattggatttttgaccaggacgaactacatgaattactgtagcacccatcgccctagccgcatccatttcatgatcttgacgagtatcaggaacgatataataatcataacctgagttaaatttatcaagataatctaaagcaaataattttacccaatacatgcggtcgaagttattaacaatcaaatccgtacctagggcttgcatcagacgacggactgaccattgatcttcaatattatttataacgtcagcaatcttattaaatgctacgaaattaactgcgtcatcaaaaacaaatacgcctttaattgggcttttactattaagatagcaaaatgcttgttccataatcgtaattacttctaatttagtcagatttaaattagtctcacgatcatagtcaattccttcaaactctttacgagttaagcaaggatagtcagtgtttgctgcaaatacaccccatgcataagccaatgcatccttaataggaccagcaagttgatatttaactgcagaataattattcatgataaaatctgcagtagtatcttttccactacgctttacaccacttaaaaagattagtttcatatgtttctcctcaaatttagttaagattataacacatgaaactgaagcattaaacttctgctataattttgccatctttttctacttgaaaatacgtataaggaatcgttgctgtgcatactaaggctgggtctgaatcttccgtgtagctaaattctacttcagagaggtcagaaacccaaggcttataaaaatttattgacatcacgatttcagttttactattatctaaaatgtaaagcgtaatgtattcaggacctgttttttgggcagtattttcgcctgtaagatagttactagttcctagcatccattcatacattcctatccacgacttaagctcttcatcaactataaatctcacgatgagtggatcgtactcaaatgtaactcctggacgctgtgctctacctagtccaaacggcccagtcacggtatcagtaacaggtattctaattcccggaataggaactgactgagcatttaaagtaaaagcagatgtagtattactatgtggtattgatactacaaagttagttgtatttgcttggttaaaaatttgttgcagtgcttgcgacatatattcctcataatgctttataaatgttggtggtataatgggtctaagtcccttccattcaattccaattagaacaaacaatagaaaagaatggaagataatagaattaatttattagacttcttaaacgagcagaagtcataaacggaaatttttctaaagttggctttcgccaatatcttggatgacaagttgatttaaaatcaagaacaattttctttgcttcatcaatagtgttaactccaaagttatctaacattattttcttttctttttcccaccgtttattagctaaagcagattgaagctttttgtttttaaatgtgtcattttttctagaatgagttgtgccttgtgtcggactccatcctcttcctaaaataaacccctcaggaattatatctccatcatgtaattttatacatcttttaccattattataatattttcgtccagtttgtgtatttgaaatattatttgcatgttttctttttaaccaaccataaactttattatttctcctaacatatttagttgaaaccgtcatttttatggctgcataagataattttaaagaatttgggtgtatttttactaatagctgatgtgcaacataatgttcttctggagttaaatcaaccaagttagaagcatcattactaccgcctaaacatttcggaataatatgatgtctttctttatatccagtaagggctctattgcgagccctatcaattagtgaattataaattttttcataattcatcgtacattgctccaaactttgtttgcagagaaacgttttcctttggagtagaagctttggagtggcattaacacaacgttcgcccagtctttcggggcgatttcaacaaggctacccataatattaccaggtatatatgccttaatcatttggtctgcacccctaaatcctttcacttgactccaatcaatttttaatttcgttttattagtaatagtaggtgtatttgaatattgctttaaaagctcttctagaaattgctgacgagctttaggtggaatatagtgcaagttcaatccgtacattaaattatgtttacctaaaccgaggtaaattatcaaaggaaatttatcccaataagggagagtttccttgtgtttagcatcgtaagcaaaagcatatattcgtcccggctgcgggcgaacaactttatgtccttttacttgcttaatagtttcagcaaaccactttctggttttattattaattgctgcaccttcattacgaattttatcacgcaatgtttgcctgaatgaatttatcataagcagttgtctttcttgcttattgagtttattcattggttttgattcaagcttttgaatcttttcagccgttttaattcctgaagcatattttgacattgccgaagtaaacgtagaatatttaatccctctttcttcagcaaattgctttcctgtcattccttttgctttggcctttctgtattcaagacctatctgaatccatttcttttcgtttaatgattgcttaacctttggaacttggggagtgctttcattaattatttgaaaaatagccattatgcccccttaaagccaagagctcgtaatccatcttctgttagaattctaaattttattccacgcttttcagctaaagcttgtgctgctttccatttgtcagtattaacggaatatgtataaatttcattcataaatcttttcttcgctgcagttgttagatgtgctggtttaactggtggttgtgtttcttttttaggttttatttcaataaaaaattcttgtccagaagaatctttcatccaaatatccatgaagtatctacgttttttcccttctgcattacaaaaataaggaattactgctgtttcactaccccatgcaataatttctggatttttatctaaccattcaaaaaagaatttttcccaatttgatctatacgtaatttttttagggtcacctctatactttgatatatttttaggaacccattttccagaatatgccattggattctccttataaatagataatatatttataaacaggagggcccatgctctttacattttttgatccgattgaatatgcggccaaaacggtgaataaaaacgcgccgactattcctatgacagatatttttagaaactataaagactattttaaacgcgctcttgcgggataccgcttacgtacttattatattaaaggttcaccacgcccggaagaattagcaaatgctatatatggaaatccgcagttgtattgggttttattgatgtgtaatgataattatgatccgtattatggatggattacttcgcaagaagctgcttatcaagcatttatacaaaaatacaaaaacgtaggtggagaccaaatagtatatcatgtgaatgaaaacggtgaaaaattttataatttaatatcatacgatgataatccatatgtttggtatgacaaaggtgataaagctagaaaatatcctcaatatgaaggagcacttgctgcggtcgatacgtatgaagctgctgttcttgaaaatgaaaaacttcgtcaaataaaaataatagcaaaatcagacatcaattcatttatgaacgaccttatacgtataatggagaaatcttatggaaatgataagtaataaccttaattggtttgttggtgttgttgaagatagaatggacccattaaaattaggtcgtgttcgtgttcgtgtagttggtctgcatccacctcaaagagcacaaggcgacgtaatgggtattccaactgataaattaccatggatgtcagttattcaacctataacttctgcagcaatgtctggaattggaggctccgttactggtccagtagaaggaactagagtttatggtcattttttagacaaatggaaaactaacggaattgtccttggcacgtatggtggaatagttcgcgaaaaaccgaatagacttgaaggattttctgacccaaccgggcagtatcctagacgtttaggaaatgatactaacgtattaaaccaaggcggagaagtaggatatgattcctcttctaatattatccaagatagcaatctagacaccgcaataaatcccgatgatagaccactatcagagattccaaccgatgataatccaaatatgtcaatggctgaaatgcttcgccgtgatgaaggattaagactaaaagtttattgggataccgaaggatatccgacaattggtattggtcatcttatcatgaagcagccagttcgtgatatggctcaaattaataaagttttatcgaaacaagttggtcgtgaaattactggaaacccaggttctattacaatggaagaagcggtaactttatttgaacgtgatttagctgatatgcaacgtgacattaaatcacattctaaagttggcccagtttggcaagcagttaatcgttctcgtcaaatggcgttagaaaatatggcatttcagatgggtgttggcggtgtagctaaatttaacacaatgttaactgctatgttagccggagattgggaaaaagcatataaagcaggtcgtgattcattgtggtatcaacaaacaaaaggccgtgcatcccgtgttaccatgattattcttacagggaatttggaatcatatggtgttgaagtgaaaaccccagctaggtctctatcagcaatggctgctactatagctaaatcttctgaccctgctgaccctcctattccaaatgactcgagaattttattcaaagaaccagtttcttcatataaaggcgaatatccttatgtgcatacaatggaaactgaaagtgggcatattcaggaatttgatgatacccctgggcaagaacgatacagattagttcatccgactggaacatatgaggaagtatcaccgtcaggaagaagaacaagaaaaactgttgataatttgtatgatataacaaatgctgatggtaattttttggtagctggcgataaaaagactaacgtcggtggatcagaaatttattacaacatggataatcgtcttcaccaaatagatggaagcaatacaatatttgtgcgcggcgatgaaactaagacggttgaaggtaatggaactatcctagttaaaggtaatgttactattgtagttgaaggtaatgctgacattacagttaaaggagatgctaccactttagttgaaggaaatcaaactaacacagtaaatggaaatctttcttggaaagttgctgggacagttgattgggacgttggtggtgattggacagaaaaaatggcatctatgagttctatttcatctggtcaatacacaattgatggatcgaggattgacattggctaatatacttccaatgagcgctgatttaggagaatccatggaaggttcttctatcgacgtcacctttaccgctcaattagaaacaggtgaaacgttagtatctataaatataactagttacgaagaaactcctggggttttagtagaagaaaatcgcttatatggaacatatgaatctgtatttggtttcggaaatgacgcgttgaaatatcgtttaggcgatgaatttaaaactgctgcttcatgggaagaacttcctactgattctaatactcagttgtatttgtggaaagctccccaaaatctccagaagacattcacttacgaagtaacattaatatatgactaccaagaacaaagtgaatctgggggttctggcagtaattctaggtcatcttctgatactactgaaccaacgaatcctcctgctccagtaagaaaaactctcgttaaaaattatactaaaactatagttggaaattggagtcgttgggctaataaattgagaagctatgtatatgagaggccataaatgtcaggattaagttatgataagtgtgttactgctggacatgaagcatggcctccaacagttgtgaatgctacacaaagtaaagtattcactggaggaattgctgttctcgtagcaggcgatccaattacagaacatacagaaattaaaaagccatatgaaacacatggcggagtgacacaacctagaacttctaaggtatatgtcactggaaagaaagctgttcaaatggctgatccaatatcatgcggtgatactgtggctcaggcatcatctaaagtattcattaaataggatttaaaatggcaaatacccctgtaaattatcaattaacaagaacagcaaatgctattcccgagatattcgtcgggggtacatttgctgaaataaaacaaaacctcattgaatggcttaatggtcaaaatgaatttttggattatgattttgaaggctcaagattaaacgttctgtgtgaccttttggcttataatacattatacattcagcagtttggtaatgctgccgtgtatgaaagctttatgcgtactgctaacttacgtagttcagtagttcaagctgcacaagataatggatatttacctacttcaaaatcagctgctcaaactgaaattatgctaacttgtgcagacgcattgaatagaaattacattactattcctcgtggtactcgctttttagcatatgcaaaagatacttcagttaatccttacaactttgtatctactgaagatgttattgctattcgtgataaaaataaccaatattttccacgtttaaaattggcccagggacgtatagtaagaactgaaatcatttatgataaattaacacctattatcatttatgacaaaaatatagatagaaaccaagttaaactatacgttgatggagcagaatggattaactggacaagaaagtcaatggttcatgctggttctacatcaacaatttactacatgcgtgaaactattgatggaaatactgagttttattttggtgaaggtgagatttctgttaacgcggcagaaggagcattaactgctaattatattgggggtcttaaacctacccagaactctacgattgttattgagtacatcagtactaacggcgcagatgcgaatggcgcagtcggattttcatatgcagatacattgacaaatataactgtcatcaacattaatgaaaatccaaacgatgacccagattttgttggggcagatggcggcggcgatccagaagatattgagcgtattcgcgaattgggtactattaaacgcgaaacccagcaacgctgcgtaactgcgaccgactatgatacattcgtctcagaaagattcggttctattattcaagctgttcagactttcactgattctactaaacctggttatgcatttattgctgctaaacctaaatcaggactatatttaactactgtacagcgcgaagatattaaaaattatctcaaagactataatttagctcctattacgccatcaattatttctcctaattatctttttattaagactaatttaaaagtcacatatgctttaaataagctacaagaatccgaacagtggctcgaaggtcaaataattgataaaattgatcgttattataccgaagacgtagaaatttttaactcatctttcgctaaatctaagatgttgacatatgtagatgatgcagatcactctatcattggctcatcagcgacaattcaaattgttcgtgaagtacaaaacttctataaaacgcctgaagcaggtattaaatacaataatcaaataaaagaccgttctatggaatctaatacgttttcatttaattctggacgaaaggttgtgaatcctgatactggtttagaagaagatgtattatatgacgttcgcatagtatcaacagaccgagattctaaaggaattggtaaagttattattggtccatttgcttctggcgatgttacagaaaatgaaaacattcagccatattcaggcaacgattttaacaaattagcaaattctgatggacgcgacaaatactatgttatcggtgaaataaattatccagctgatgtgatttattggaatatcgctaaaattaatttaacatctgaaaaatttgaagttcagactattgaattatattctgatccaaccgatgatgttatctttactcgcgatggttcactgattgtatttgaaaatgacttacgtccacaatacttaactatcgatttggagcctatatcacaatgacagtaaaagcaccttcagtcactagtctcagaatttccaagttatccgcaaatcaggtgcaagtacgctgggatgacgttggtgctaatttctactattttgtagaaatcgctgagacaaaaacagactcgggggaaaatctcccgagtgatcaataccgttggattaacttaggatatactgcaaataacagcttcttttttgacgatgctgacccattgacatcatacattattagagtggctacagctgcacaagattttgagcagtctgattggatttataccgaagagtttgaaacttttgctacaaatgcttatacatttcaaaacatgattgaaatgcaattagccaataaattcattcaggaaaaatttactcttaataattctgattatgttaattttaacaatgacactataatggctgcattgatgaatgaatcatttcaattcagcccatcatatgttgatgtttcatcaataagcaattttattattggcgaaaatgagtatcatgaaatacaaggttctattcagcaagtatgtaaggatattaaccgagtttatttgatggaatcagaagggattttatacctttttgagcgttatcaacctgtagttaaagtatccaatgataaaggacaaacttggaaagctgtaaagctcttcaatgaccgcgtaggatatcctttatctaagacagtatattaccaatctgcgaacacaacatacgttctaggatacgacaagattttctatggccgcaaatctactgatgtcagatggtcagctgacgatgtcagatttagttcgcaggatataacattcgctaaacttggcgatcaattacatttaggatttgatgtagaaatttttgccacttacgcgactttaccagcgaatgtatatcgcattgcagaagctattacttgcaccgatgattacatttacgttgtcgccagagacaaagttagatacataaaaacgagtaatgcacctatagattctgatccattatctccaacatattcggaaaggctttttgaacctgatactatgactataactggaaatcctaaagcagtatgctataaaatggattctatcggtgataaagtttttgctcttattattggcgaagttgaaacattaaatgctaatcctagaacatcaaaaataattgattctgctgataaaggaatatatgttttaaatcatgacacaaaaacatggaaaagagtttttggcaacactgaagaagaaagaagacgtattcaaccagggtatgcgaatatgtcaactgacggtaaattagtttcgctatcttcgagtaattttaaatttttaagtgataatattgttaatgaccctgaaactgcatcaaaataccagttaatcggtgccgttaaatatgaatttcctcgtgaatggttagctgataagcattatcatatgatggcatttatagcagatgaaaaatctgattgggaaacttttacacctcagccaatgaaatactatgcagaaccattctttaactggtctaaaaaatctaacacacgttgttggataaacaactctgatagagctgtagtagtttatgctgatttaaaatacactaaagttattgaaaattttccagaaacatctccagatagattagttcatgaatactgggatgacggcgattgcactatagtaatgccaaatgttaaattcactggatttaaaaaatatgcatctgggatgcttttttataaagcctccggtgaaataatttcttactatgattttaattatcgtgttagagatacagtagaaattatttggaagccaactggagtatttttaaaagcatttttacaaaaccaagaacatgaaactccttggtcgcctgaagaagagcgtggattagctgaccctgatttaagaccattgattggcacaatgatgcctgattcttatttgttacaggattcgaattttgaagcattttgcgaagcatatattcaatatctttctgatggatatggaactcaatataacaatttacgaaatttaattcgtaacaaatatccacgagaagagcatgcatgggaatatttgtggtcagagatatataaaagaaacatttatttaaatgctgacaaacgtgatgctgttgcaagatttttcgaatcacgcagctatgatttttattctactaaaggaattgaagcatcatacaaatttctttttaaagttctttataatgaagaagttgaaattgaaatcgaatctggggctggtactgaatatgatataatcgttcaatctgattctttgaccgaagacttagtaggacaaacgatttatacagctacaggaagatgtaatgttacttatatagaaagaagctattctaatggtaaattgcaatggaccgtaactattcataatcttttgggaagattaattgctggtcaagaagttaaagcagaaagactccctagtttcgaaggcgaaattattcgcggggttaaaggaaaggatttgcttcaaaataatatagactatattaatagaagtagatcatattatgtaatgaaaattaaatccaatttaccttcttcccgctggaaatctgacgttattcgttttgttcatccagtaggatttggatttatagcaattacccttttaacgatgtttattaatgttggtttaactcttaaacatacagagactataattaataaatacaaaaactacaaatgggattctggattgcctactgaatatgctgatagagtagctaaattgactccgactggtgaaattgagcatgattcggtaacaggcgaagcaatttatgaacctggcccaatggctggcgtagaatatcctcttcctgatgactataatactgaaaataacaattcaatatttcaaggtcaattgccgtctgaacgacgcaaattaatgagtcctctatttgacgcatctggaacaacgtttgcgcaatttagagatttagttaataaacgtctaaaagataatataggaaatccaagagaccctgaaaatccaacacaggttaaaatagatgaatgattcaagtgttatctatcgtgcgatagttacttcaaaatttagaacagaaaaaatgttgaatttttataattcaattggaagtggtccggataaaaacactatctttatcacatttggaagatcagaaccgtggtcatcaaatgaaaacgaggtgggctttgctccaccttatcctaccgattctgtattaggtgtaactgacatgtggactcatatgatgggaaccgtaaaggttcttccatctatgcttgatgcagttattcctcgtagagattggggagatactagatatccggatccatacacatttagaattaacgatattgtagtgtgtaactcagctccttacaatgctactgaatcaggcgcaggctggttagtatatcgttgtttagatgttcctgataccggaacgtgttcaatagcatctttaactaataaggatgaatgccttaagttaggtggaaaatggactccttctgttaggtcaatgactcctcctgaaggtcgaggagacgctgaaggaacaatcgaacccggcgacggttatgtttgggaatatctttttgagattccgcctgatgtatctataaatagatgcacgaatgaatatatcgtagttccttggcctgaggaattaaaagaagacccggctagatgggggtatgaagataatctcacttggcaacaagatgattttggattaatttaccgtgttaaggcaaatactatccgttttaaagcatatttagattcagtttactttcctgatgctgcattaccgggaaataaaggatttagacaaatatcaataatcaccaatcctcttgaagctaaagttcatccaaatgacccaaacgttaaagctgaaaaggattattatgatccggaagatttaatgaggcattcgggcgaaatgatttatatggaaaataggccacctattatcatggcaatggatcaaacagaagaaatcaatattctgtttacattttaaattaagggagcccatgggctccctttttctttataaatactataaactcataaggaaaccgctatgttcattcaagaaccaaagaaattgattgataccggcgaaattggtaacgcttctactggtgatatcttattcgacggtggtaataaaattaatagtgattttaacgcaatttataatgcgtttggcgatcaacgtaaaatggcagtagcaaatggcactggagcagatggccaaattattcatgctactggatattatcaaaaacactctattgcagagtacgcaactccagtaaaagttggcactaggcatgatattgatacctctactgtaggtgttaaagttatcattgaaagaggcgaacttggtgactgcgttgaatttattaactcaaatggatctatatcagttactaatcctttaacgattcaagcaattgattcaattaaaggtgtttcaggcaatttagtagtaactagcccatatagtaaagtaactttacgctgtatttcatctgataattctacatcggtttggaattattctattgaaagtatgtttggacaaaaggaatcaccagctgaaggtacatggaatatttctacatccggatcagttgatattccattatttcatcgtactgaatacaatatggctaaattgctagttacatgccagtcagtagatggaagaaaaattaaaacagcagaaataaatattcttgtggatactgttaattcagaggtaatttcttctgaatatgctgtcatgcgggttggaaatgaaaccgaagaagacgaaatcgctaatattgcatttagtattaaagaaaattatgtaatggcgactataagttcttctattgttggcatgagagcagcagttaaagttatcgctacgcagaaaatcggggtggctcaataatgaaacaaaatattaatatcggtaatgttgtagatgatggtaccggtgactacctgcgtaaaggtggtataaaaataaatgaaaactttgatgagctttattatgaactcggtgatggtgatgttccatattcagccggtgcctggaaaacttataacgcttcatctgggcaaacactaacggcagaatggggaaaatcatacgctattaatacttcgtctgggagagtaacactacaacttcctaaaggaactgttaatgattataataaagtaattagagctagggatgtatttgcaacatggaacattaatccagttacattagtagctgcttctggcgatacgattaaagggtcgtcatcatcggttgaaattaatattcaattcagtgatttggagttagtttattgtgctccaggacgctgggaatatgtcaaaaataagcaaattgacaaaattatcagttcagacattagtaatgtagctcgtaaagaatttttagttgaagttcaaggacaaactgactttttagatgttttcaatggaactagttataatgtcaataacatcagagtaaaacatcgtggtaacgaattgtattacggcgatgtatttagcgaaaacagtgactttggctctccgggcgaaaatgaaggcgaattagttcctcttgatggatttaatattcgattaagacagccttgtaatattggtgacactgttcaaattgaaacatttatggatggtgtatcacaatggagaagttcatatacaagacgccaaataaaagtactggattcaaaactaacatcaaagacttctttagaaggaagcatttatgttactgatttatcggcgatgaaatcaattccattttctgcatttggattaattcctggtgaaccaattaatccgaactctcttgaggttcgttttaatggaattttgcagcagcaggctggaacagctggatatcctctgtttttgtgtgaaggcgctaattcagatacgcaagaaggatgtatatctcttggtggcgaatggaaagaatcaaacaccgattattctatagaatatgaagacggaaaacctatcagtcttttatttgatagaaaatttgaatccggtgacattatcgttataacatggttcaataatgatttaggaactcttttagaaaaagatgacatcattgaattgactgatgaccgttatgttagtaaaggatcatctactgaagttactggtgatgtggccttaacagattttgataaaatcggttggccaaatgttgaaaaagttgattcttatactagaacgtataattcaatatcatctattttcgacagcatttatcctgttggttcaatttatgaaaatgctataaacccaaataatccggtgacttatatgggatttggttcatggaaattatttggtaaaggacaagttttagtaggatggaatgatgatgttacggatccaaactttgctttaaacaataatgatttagattctagcggaaatccttcacatacggcaggtggaacggttggaacaacatcagtaacgcttgaaaacgcaaatcttcctgcaactaaaaccgacgaaagagttttaattgaagacgaaaatggatcggttattattggaggttgccaatatgacccagatgaaactggtcctatatatacaaaatatcgtgaagattacgcaacaacaaactcttcacatactcctcctgctaatattagtaatattcaaccgtctattactgtataccgttggataaggattgcataatgagtttacttaataataaagcgggagttatttcccgcttagcagattttcttggttttagaactaagaaaaatgatatttcggttatgaataatcagccagtaggtgctgtaacaatttcacaaatagcaaaagggttttatgacccaaatgtagaatctgctattaatgatgttagaaatatggcagagcaacaggttggagctgtattagttaatataagtggcgtatctcctactggcgtgcagcaaacagactattggtcatttgaaggaactgttactgatacttcagccaaaccaggtgacccagttattgttaacatgtttggtattccagttaaagctactaatggaatgacttcaatcgaattcacgagtgccgttagaacagctctacaggaaatggttgcaaaatttattgcaattgattcatttgaagaccatcctactataggaaataaaatacaagttaagtatttagataaccaagaacatatcttagaacaatactctgataaaggaattactttcaaacaagaaataatttctccttctaaacctgggtatggaacttggcaattattaggtgcgcaaactgttacgctagatagtcacacacaacctacagtattttattattttgagagaatagcatgagtaacaatacatatcagcacgtatcaaatgaatcaaaatatgttaaattcgatccagtaggatcgaattttcctgacactgtcacgacagtgcagtctgcattatcaaaaataagtaatattggcgtaaatggtattcctgatgcaactatggaagttaaaggaatagcaatgattgcgtcagagcaagaggttttagatggaactaataattctaaaatcgttacacctgctacattagcaacaagattattgtatccaaatgctactgaaactaaatatggtttaacgcgctattcaacaaatgaagaaactttagaaggctcagataataattcgtcgataactccacaaaaattgaaataccatactgacgatgtattccaaaacaggtattcatctgaatcatcaaatggagttattaaaatatcatctacacctgcggctttggctggtgtagatgatactacggcaatgactccattaaaaacccaaaaacttgcaataaaattaatttcacaaatagctccttcagaagacacagcatcagaatctgttagaggtgtagttcagttatcaactgtcgctcaaactcgtcaaggaactcttcgcgaaggatatgcaatttctccgtatacctttatgaattctgttgcaacacaagaatataagggtgttatacgtttaggaacacaatcggaaattaacagtaatttaggagatgttgcagtaacaggcgaaacattaaatggtcgaggagctactggttctatgcgcggtgtagtaaaattaacgacgcaagccggtattgcccccgaaggtgatggctctggagcattagcatggaacgcagatgtaattaatactcgcggtggacaaactattaacggttctttaaatttagaccatcttacagcaaatggaatttggtcacgcggcggtatgtggaaaaatggcgatcaacctgttgccactgaaagatatgcgtctgaaagggttccagttggaactattatgatgtttgcaggtgattctgcacctccaggttggattatgtgccatggtggaaccgtgtcaggagatcaatatcctgattatagaaacacagttggaacaagatttggtggtgattggaataaccctggcattcctgatatgcgaggtcttttcgtcagaggagctggcacaggaggtcatattttaaatcaacgaggacaagatggttatggaaaggatagacttggcgtaggatgtgacggaatgcatgttggcggtgttcaagcacaacaaatgtcataccataaacatgctggtggctggggagaataccaaagacatgaagctccatttggcgcgtccgtttatcaaggatatcttggaactagaaaatatgccgactgggataacgcttcatacttcactaatgatggatttgaattaggtggaccgagagatgcccttggtacacttaatcgtgaaggattaattggttatgaaactagaccatggaatatatcattaaactatattattaaaattcattactaaggattacaaatgattgaattaaaagagttaccttttgttgatagcgttcctggcgaaggtcaggaacgtatttcatggattaaaaatggtgaagaaatattaggagctagtactaagtatggaaacgatgggtcaatgaatagaccaactgtttccgtgtttaaaaacgtcgaggttctcgacgaaaatgtaggaattcttaaaactgccattgaaacatctcaggaagatattaaaactattcaaggcattttagatgtatcaggagatatagaagcgctatcacagatcagcgttaataaaaatgatatatcaagtttaaagacgctcacaagtgaacatactgatatattaaatggtacaaatactacggttgataatattctttctgatattggtccatttaattcgcaagcaaattcagtttatagaacgattagaaatgatttgctgtggattaaaagggaactaggacaatatgctggacaagatattaatggtcttcctgttgtaggaaatagcagcacggggatgaagcaccgtatcattaataatacagatgctataacttcccaaggaatacgtctaagtgatttggaagaaaaatttattgaatctgatgtaggttcgcttacaatcgaagtaggaaatcttagacaggaattaggacaaagaccgccttcatttagtgaaagtatatattcacgtgtgcataatttagatcaatcacaaattaatcttaattccgaaattaaatctatcaaaacttctattggatatccaggaaatacttcaataatcacagatgttaacactaatacacgagaaatttcagctttaactgatgagctaaataaaagcggaggtgttaaacagcgattaactgtcattgaaacatcaattggctcagatgatattccttctagtattaaaggtaaaattaaagataatacaacatctattgagtttttaaatggaattgttggtgaaaacacttcatctggactacgagcaaacgtttcgtggttaaaccaaattgttggaactgattctagcggtggacaaccttctcctcctgggtctcttttaaatagagtttcaacagttgaaacttccgttaatagactgaataatgatgttcaaaacttgcaagttgaaattggtaataacaattccggaattaaaggacaggttgtaacattaaataaattagtaaatggaacaaatccaaatggttcaactgtcgaagaacgtggattaactaattcaataaaagctaatgaaactaacatttcttctattaatcaagaaatgcgtagtattaaaagtaatgtatcttcattacaggcggatgttcagactttacaggaagcaggttatattcctgaagctccaaaagatggtcaagcttacgttcgtaaagacggcgaatgggtattactttctacctttttatcaccagcataacatggggccgcaaggccccaaaggatttttaaatgtcaggatataattctcaaaatccaaaggaactcaaagatgtcattctaagacgtttaggggctccaattattaatgttgagttaacacccgatcaaatctatgattgcatccagcgtgccctagaattatacggtgaataccattttgatggacttaacaaaggttttcatgtattttatgtaggagatgacgaagaaaaatataagaccggagtcttcgatttaagaggttcaaacgtattcgcagtaactcgaattttacgtacaaatgttggatcaataacgtcaatggacggaaacgctacatatccatggtttactgactttcttttaggaatggctggtattaatggtggcatggggacttcttgtaatagattttatggaccaaacgcctttggagctgatttagggtattttacccagcttaccagttacatgggaatgatgcaagatatgctttctcctattccagacttttggttcaattcagcaaatgaacaactcaaagtcatgggaaacttccaaaaatatgatttgattatcgtagaaagctggactaaatcatacattgatacaaacaaaatggttggaaatacagtaggatatggaacagttggtccgcaagatagttggtcattatctgaacgatataataatccagaccataatttagtaggtcgtgttgtgggtcaagacccagatgttaagcaaggtgcttataataatcgttgggtgaaagactatgctacagctttagctaaagaattaaatggccaaattttagcacgtcaccaaggcatgatgcttccaggcggtgttacaattgatggacaacgcttaatagaagaagctcgattagaaaaagaagcattacgcgaagaattatacttgctcgatcctccatttggaattttggtaggttaatatggctacttatgataaaaatctttttgctaaattagaaaatcgcactggttattctcagactaatgaaactgaaatactaaatccttatgtaaatttcaatcattataaaaacagccaaatattagctgatgtattagtagctgaaagcattcaaatgcgaggtgtagaatgctactatgttccaagagagtatgtttctcctgatttgatattcggcgaagacctaaaaaataaatttactaaagcttggaaatttgctgcatatttaaattcatttgaaggatatgaaggagctaaatcattctttggtaactttggtatgcaagtacaggatgaagtaactttgtctattaatccaaatttgtttaaacaccaagttaacggaaaagaacccaaggaaggggatttgatatattttcctatggataacagcttattcgaaattaactgggttgaaccatatgatccattttatcaattaggccaaaacgctattcgtaaaattacagcaggtaaattcatttattctggagaagaaattaatccagttctacagaaaaatgaaggaatcaacattccagaattcagtgaattagaattaaatcctgttcgcaatcttaatggtattcatgatattaatattgatcagtatgctgaagtagatcaaattaattctgaagctaaagaatatgttgaaccttacgttgttgtcaataatagaggcaaatctttcgaatctagcccatttgataatgatttcatggattaataaatattataaactaattaaagcccagattaggagaaatcatgtttggttatttttataattcgtcttttagacgatatgctaccttgatgggcgatttgttttcaaatatccaaatcaaacgtcagttagaatctggtgataagtttatacgtgttcctattacgtatgcatcaaaggaacacttcatgatgaaattaaataaatggacatcgataaattcacaagaagatgtagctaaagttgaaactattctacctcgtataaatttacatttagttgattttagctataatgctccatttaaaacaaacattttaaatcagaatttactgcagaaaggcacaacttctgtagtatcacagtataatccatctcccattaaaatgatttatgaattgagtatctttactcgttacgaagacgatatgtttcaaatagttgaacagattcttccatattttcaacctcattttaatacaactatgtacgaacagtttggaaatgatattccatttaaaagggatattaaaattgtactgatgtctgctgctatagatgaagctatagatggagataatttatctcgtcgtagaattgaatggtcactaacatttgaagtaaatggatggatgtatcctccagtagatgatgcagaaggattaattcgtactacttatacagattttcacgccaatacaagagatttgcctgatggcgaaggtgtttttgaatctgtcgatagcgaagttgttcctcgagatattaacccagaagactgggatggaacagtaaaacaaactttcaccagcaatgtaaatagaccaacaccgccagaacctcctggcccaagaacatagaggttattatggaaggtcttgatataaacaaacttttagatatttctgacctccccggaattgacggggaggaaattaaagtatatgaacctctgcaattagtagaagttaaaagcaatcctcaaaaccgtactcctgacttagaagatgattatggagtagttcgtcgaaatatgcattttcaacaacaaatgctaatggacgcagccaagatttttcttgagacggcaaagaatgctgattctcctcgtcacatggaagtatttgcaactcttatggggcaaatgactacgacgaacagagaaatactgaagcttcacaaagatatgaaagatattacatctgaacaggttggcaccaaaggcgctgttcctacaggtcaaatgaatattcagaatgcgacagtattcatgggttcaccaacagaattaatggacgaaattggtgatgcttacgaggctcaagaagctcgtgagaaggtgataaatggaacaaccgattaatgcattaaatgatttccatccgttaaacgaagctggaaaaattttaataaaacacccgagcttagcagaaagaaaagacgaagatggaattcattggataaaatcacagtgggatggaaaatggtatcctgaaaaattcagtgattatcttcgtctacacaaaatagtaaaaattccaaataattctgataagcctgaattatttcaaacttataaagataagaataataaaagatctcggtatatgggtcttcctaacttgaaacgagctaatattaaaacgcaatggactcgtgaaatggttgaggagtggaaaaaatgccgagacgatattgtttattttgcggaaacatactgcgctattactcatattgactatggtgtcataaaggttcaattacgtgactaccaacgtgatatgctcaaaataatgtcatctaaacgtatgactgtttgtaatttatcacgtcagcttggtaaaacaactgtagtagctatttttcttgcacactttgtatgctttaacaaggataaagctgtaggtattcttgcgcacaaaggctcaatgtctgcagaagttttagatcgtactaagcaagcaattgaactgcttcctgactttttacaacccggaattgttgaatggaataaagggtctattgaacttgataatggttcctcaatcggagcctatgcttcctctcctgacgcagttcgtggtaactcgttcgcaatgatttatattgacgaatgcgcgtttattccaaacttccatgattcctggcttgctattcaaccggtaatttcatctggtcgtcgttcgaaaattattattactacgactcctaatggattaaatcatttttatgatatttggactgctgctgttgaaggtaaatcagggtttgaaccatacactgctatttggaattcagttaaagagcgtctttataacgatgaagatatttttgacgatggatggcaatggagcatacaaactattaatggttctactttagctcaatttcgtcaagaacacaccgcagcgtttgaagggacttctggtacattaatttcaggaatgaaattagctgttatggatttcattgaagtaactccagacgatcacggttttcatcgatttaaaagtcctgaaccagatagaaaatatattgcaactttagactgttcagaaggtcgtgggcaagattatcacgctttacatattattgatgttaccgatgatgtgtgggaacaggttggtgttttacattcaaacactatttctcatttaattctacctgacatcgttatgcgttatttagtagaatataatgaatgcccagtttatattgaattaaatagtactggtgtgtcagttgcgaaatcactttatatggatttagaatacgaaggcgttatttgcgattcatatactgatttaggaatgaagcaaactaaacgaacgaaagcagtaggatgctctacattaaaagaccttattgaaaaagataagcttattattcatcaccgcgcaactattcaagagtttagaacgtttagtgaaaaaggcgtgtcttgggcggctgaagaaggttatcacgacgatttagtaatgtctttagtgatttttggatggttatcaacgcaatcaaaatttattgattatgctgacaaagatgacatgcgattagcgtctgaagtgttttcaaaagaactccaagatatgggtgatgaatacgctccagttatatttgttgattcggttcattctgctgagtatgttccagtatctcatggtatgtcaatggtataaatatattaaagcatattaaagaggattaaaaatgactttattatctccgggcattgagctcaaagaaactacggttcaaagcaccgtggttaataactctactggtacagcagctttggccggtaaattccagtggggtcctgcttttcaaattaaacaggttacaaatgaagtagatttagttaatacttttggtcaacctacagctgaaactgctgactattttatgtctgcaatgaatttcttacaatacggaaatgatttgcgagttgtgcgtgctgtcgatagagataccgctaaaaactcatctccgattgccggtaatattgaatacactatttctaccccaggtagtaactacgcggttggagataaaatcacggttaagtatgtttcagaagatgttgaaacagaatgtaaagttaccgaagtagatgctgatggaaaaattaagaaaattaatattcctaccgcaaaaattatcgctaaagcgaaagaagtaggcgaatatccagcattaggttctaactggaccgcggaaatttcttcgtcttcctctggtttagctgcagtaataactcttggaaaaattattactgattctggtattttattagctgaaattgaaaatgctgaagctgctatgacagctgttgactttcaagcaaatctcgaaaaatatggaattccaggagtagtagctctttatccaggcgagttgggcgataaaatcgaaattgaaatcgtatctaaagctgactacgcaaaaggtgcttctgcattacttccaatttatccaggtggcggaacacgcgcatctactgccaaagcagtgtttggatatggaccacaaactgattcacaatacgctatcatagttcgtcgcaatgatgctattgttcaaagcgttgttctttcgacaaagcgaggtgaaaaagatatttacgatagtaacatctatattgacgactttttcgcaaaaggtggttcagaatatattttcgcaactgcacaaaactggccagaaggcttctctggaattttaactctgtctggtggattatcatcaaatgctgaagtaacagcaggagatttgatggaagcttgggacttctttgctgaccgtgaatctgttgatgttcagttgtttattgcgggttcttgtgccggtgaatctttagaaacagcatctactgtccaaaaacacgtcgtttcaattggggatgctcgccaagattgcttagtactgtgctcgccaccgcgtgaaactgtagttggaattcctgtaactcgtgctgttgataacttagtcaattggagaactgcagcaggttcatacactgataataactttaatatcagttcaacctacgcagcaattgatggtaactacaagtatcagtatgacaaatataatgatgtaaatcgttgggttccattagcagctgatattgctggtttatgcgcgagaaccgataacgtttctcagacttggatgtctccagctggttataatcgcggccagattttgaacgttattaaacttgctattgaaactcgccaggcgcagcgcgaccgtttatatcaagaagctatcaacccagtaactggtacaggtggtgatggttacgtattgtatggtgataaaacagctacttctgttccttctccatttgatcgtattaacgttcgtcgtctgtttaatatgttgaaaacgaatatcggacgtagttcaaaatatcgtttgttcgaattaaacaacgcgtttactcgttcatcgttccgcacagaaacttcccagtacttgcagggaattaaagctctcggtggaatttatgaatatcgtgtagtttgcgatacaacaaataacactccgtcagtaattgatagaaatgagtttgttgcaacattctacatccaaccggctagaagcattaactacattaccttaaacttcgtagcaactgctactggtgcagatttcgatgagttaactggtcttgcaggttaatacggtgcattctaaaggcctgtttcggcaggccatataaatacactatatccttaattctttaattctatatgccctaggttaaacatagggatataaatactacagaggctaatatgtttgtagatgatgtaacacgagcgtttgaatctggtgattttgctcgacctaacttattccaagtagaaatttcttatcttggtcaaaattttacgtttcaatgcaaagccactgctttaccagctggtattgtagaaaaaattccagtcggatttatgaaccgtaaaattaacgtagcaggcgatcgtacattcgatgactggactgttacagtaatgaacgatgaggcacatgatgctcgccagaagtttgttgattggcaaagcattgctgctgggcaagggaacgaaattactggtggaaaaccagcagagtataaaaagagcgctgttgttcgccaatacgctcgtgatgctaaaactgtaacaaaagaagtcgaaattaaaggcctgtggcctactaacgtgggtgaacttcaattagattgggattcaaacaatgaaatccaaacctttgaagtaactcttgctctcgattattgggaataaaatgaatggggagaaatccccatcctgcttaaagcagagaagtccattataaatataactataattcccatttggagaatacaatgaaatttaatgtattaagtttgtttgctccatgggctaaaatggacgaacgaaattttaaagaccaagaaaaagaagatcttgtttccattacagccccaaagcttgatgatggagcaagagaatttgaagtaagctcgaatgaagctgcttctccttataatgctgcattccaaacaatttttggttcatatgaaccaggaatgaaaactactcgtgagcttattgatacatatcgtaatctcatgaataactatgaagtagataatgcagtttcagaaatcgtttcagatgctatcgtctatgaagatgatactgaagtcgtagcgttaaatttggataaatctaaatttagcccaaaaattaaaaatatgatgttagatgaatttagcgatgtattaaatcatctatcatttcaacgaaaaggttctgatcattttagacgttggtatgtcgattcaagaattttctttcataaaattattgatccaaaacgtccaaaagaaggcataaaggaattacgtagattagacccacgtcaagttcagtatgttcgtgaaattataacagaaactgaagctggcacaaaaatagttaaaggttacaaagagtattttatatatgatactgcacacgaatcatatgcatgtgatggtagaatgtatgaagctggcacaaaaataaaaattcctaaagctgccatcgtttatgcccattctggattagtcgattgctgtggtaaaaatatcatcgggtatttgcatcgtgctgttaaacctgctaaccaattaaaattattagaagatgctgttgtcatttatcgtattactcgtgctcctgaccgtcgtgtttggtatgtagacacaggtaatatgcctgctcgtaaagctgccgagcacatgcaacatgtcatgaacacgatgaaaaaccgtgtagtatatgacgcatcgaccggtaaaataaaaaatcaacagcataatatgtctatgaccgaagactactggttgcagcgccgcgatggtaaagctgtaacagaagttgatactcttcctggtgctgataatactggtaatatggaagatgttcgttggtttagacaagctctttatatggcattacgtgttcctctttcacgcatcccgcaagaccaacaaggcggtgtgatgtttgattctggaactagcattacacgtgatgaattaacgtttgctaaatttattcgtgagttacagcataagtttgaagaagttttcctggatccgcttaaaacaaatctgttgcttaaaggtataatcacagaagatgagtggaatgatgaaataaataatattaagatagaatttcatcgggatagctactttactgaactcaaagaagcagaaattttggaacgaagaattaatatgctaaccatggcagaaccatttattggtaaatatatttctcacagaactgctatgaaagatattttgcagatgactgatgaagaaatagaacaagaagccaagcaaattgaagaagagtctaaagaggctcgtttccaagaccccgaccaagaacaagaggatttttaatggaaggtttaattgaagctattaaatcaaacgacctcgtagccgctcgtaaattctttgctgaagccatggctgcaagaacgattgatttaattaaagaagaaaaaatcgctatcgctcgcaatttcttaatcgaaggtgaagaacctgatgatgaggatgacgaagacgaggatgatgacgaagatagcgatgataaagacgacaaaaaagacaaagactctgacgaagacgaggatgatgaataatgcttctgatccctgaaactcatgaattagttctcgagaatgtcgaagcacttattcctgaagcacagggtcgctttgacgaattgtcttctgctttaaataaagacgatataaatacaattgtcgagaatatgcttgatgatgaaactgatttagcgattgcattagcttctattaatgaagatatgccgctaaacgaattcatcgttaaacatgtttctgctcgtggtgaaattacacgtactaaagaccgcaagacgcgtgaacgtaatgcatttcaaaccaccgggctgtctaaagcaaaacgtagacaaattgctcgcaaagctaccaaaacgaagattgccaacccagcaggtcaatctcgtgctcagcgtaagcgtaaaaaagctcttaaacgccgtaaagcattaggattaagctaatgaatgaaccccaattactaattgaaacttggggtcaacctggcgaaattattgatggtgtgccaatgcttgaatctcatgatggaaaagacctcggtttaaaacctggtttatacatcgaaggaatattcatgcaagcggaagtcgtcaatagaaataaacgtctttatccaaaacgcatattagaaaaagcggtaaaagactatatcaatgagcaagttttaactaaacaagctctcggagaattaaatcatcctccacgcgctaatgttgacccgatgcaagccgctatcattatagaagatatgtggtggaaaggaaatgacgtatacggacgagctcgtgttattgaaggtgaccatggtcctggagataaattagcagctaatattcgtgccggatggattccaggagtttcttctcgtggattaggttcattgactgacacaaataaaggttatcgtatcgtaaacgaaggattcaaattaactgtaggtgttgatgcagtatggggtccaagtgctccagatgcatgggtaactcctaaggaaattaccgaatcacagacggcggaagccgatacaagtgccgatgacgcctatatggctctcgcagaggccatgaaaaaagcgttataaatattattatctaaacaacaggactacaaaatgcttaaagaacaactgattgctgaagcgcaaaaaattgatgcttccgttgctcttgatagtattttcgaatcagttaatatttctccggaagcaaaagaaactttcggcactgtattcgaagctaccgtcaagcagcacgccgttaaattagctgaatctcatatcgctaaaattgctgaaaaagcagaagaagaagtagaaaaaaataaagaagaagccgaagaaaaagctgagaagaaaattgctgagcaagcttctaaattcatcgaccatcttgcaaaagaatggctcgctgaaaataaattagcagttgataaaggcatcaaagccgaactgtttgaatccatgctaggtggattaaaagagctctttgttgaacacaacgttgttgttccagaagaatcagttgatgttgtagctgaaatggaagaagagctgcaagaacataaagaagaatcagctcgtctgttcgaagaactcaataagcgtgacgcatatatcaattatgtgcagcgtgaagtggcattgagcgaaagtactaaagatctgactgagtctcaaaaagaaaaagtctctgctctggtcgaaggtatggattattcagatgcattctcaagtaaattgagtgccatcgtagaaatggtgaagaagtctaataaagatgaaagcactattactgagggtataaatactcctgatactgaagcagccggactgaatttcgtcactgaagctgtagaagataaagctgcacctggtgcagaagatattgtaagtgtatatgcgaaagtcgcatctcgtttctaattttaaaggttaacacaaatgactatcaaaactaaagctgaacttttgaacaaatggaagccattactggaaggtgaaggtttaccggaaattgctaatagcaaacaagcgattatcgctaaaatctttgaaaaccaggaaaaagatttccaaacagctccagaatacaaagacgaaaaaatcgctcaggcgttcggttctttcttaacagaagctgaaatcggtggtgaccacggttacaacgctactaacatcgctgcaggtcagacttctggcgcagtaactcagattggcccagctgttatgggtatggtacgtcgtgctattcctaacctgattgctttcgatatttgcggtgttcagccgatgaacagcccgactggccaggtattcgcactgcgcgcagtatatggtaaagacccaatcgcttccggtgctaaagaagcattccatccaatgtatggtccagatgcaatgttctccggtcagggtgctgctaagaaattcccagctctggctgctagcacagaaaccgttgtaggtgacatctatactcacttcttccaggaaactggtactgtgtatctgcaagcttctgctcaagtaacaattagtgcaagcgcaactgacgctgctaaattagatgctgaaattaagaaacaaatggaagctggtgtactggtagaaatcgctgaaggtatggctacttctatcgctgaacttcaggaaggtttcaacggttctaccgataacccatggaatgaaatgggcttccgtatcgataaacaagttatcgaagctaaatctcgtcagctgaaagctgcttactctatcgaattagcacaagacctccgcgctgttcacggtatggatgctgatgctgaactgtctggtattctggctaccgaaatcatgctggaaatcaaccgcgaagttgttgattggattaactactcagctcaggttggtaaatctggtatgaccctgactccgggttctaaagctggtgtatttgacttccaggatccgattgatattcgtggtgctcgctgggcgggtgaatcctttaaagctctgttgttccagattgacaaagaagcagttgaaattgctcgtcagaccggtcgtggtgaaggtaacttcattatcgcttcccgtaacgtagttaacgttctggcttcagttgataccggcatttcttatgctgcacagggtctggctaccggatttaacactgatactaccaagtcagtatttgctggtgttctgggtggtaaataccgtgtatatatcgaccagtatgctaaacaggattatttcactgtaggttataaaggtccgaacgaaatggatgctggtatttactacgctccatatgtagctctgactccgctgcgtggttccgatccgaagaacttccaaccagtaatgggattcaaaactcgttacggtatcggtatcaacccatttgcagaatccgctgctcaggctccggcttctcgcatccaaagcggtatgccttctattctgaatagccttggtaaaaacgcttacttccgccgtgtatatgttaaaggtatctaatctttgacgatttaagggaccttcgggtccctttagttgtttttatggtataaataaatcatataaaccaaaaggaaagcgcaatggctaaaatcaacgaacttctgcgcgaatcaaccacaacgaatagcaactcaatcggtcgcccaaatctcgttgctttgactcgcgctaccactaaattaatatattctgacattgtagcaacgcaaagaactaatcaacctgttgctgctttttacggtattaaataccttaacccagataacgaatttacatttaaaactggtgctacttacgctggcgaagctgggtatgtagaccgagaacaaatcacagaattaacagaagagtctaaattaactctcaataaaggcgatttattcaaatataataatatcgtttataaagtattagaagatacaccatttgctgatattgaagaaagcgatttagaattagctcttcagattgcaatcgttcttttaaaggttcgtctattttctgatgctgcagtaacaaacaaatttgaaagctctgatagtgaaattgcggatgctagattccagattaataaatggcaaaccgcagttaaatctcgtaaacttaaaactggcatcacagttgaattagcacaagatttagaagcaaatggattcgatgctcctaatttcttggaagatttgcttgcaactgaaatggcggatgaaatcaataaagatattctacagtctttgattacagtatcaaaacgctataaagttacaggaattactgatactggattcattgatttgagttatgcatctgcacctgaagctggtcgttcattataccgaatggtgtgtgaaatggtttcacatatccagaaagaatcaacttatacagcaacgttctgcgttgcttcagctcgtgccgctgcgattcttgctgcatcaggttggttaaaacataaaccagaagatgacaaatatctttcacaaaatgcctacgggttcttagctaatggtttaccgctttattgcgataccaacagcccattagattatgtaatcgttggcgtagtagaaaatatcggtgaaaaagaaattgttgggtcaattttctatgctccgtatacagaaggtcttgacttagatgaccctgaacatgtaggtgcatttaaagttgtagttgatccagaaagtttgcagccatctatcggtttattagttagatatgctttatccgcaaatccttacactgtagcaaaagatgaaaaagaagcaagaataattgatggtggagacatggataaaatggcgggtcgttcagatttgtctgttttattaggtgttaagctaccaaaaattatcattgatgaataaaacaaagggacctttcggtccctttttatttaacttaccaattcaatccaagccggacgaagtacatcttgtaccattttaactaattccttcttaatcaaagaaggattatccgcttgagttagagtaataccttcacgagaagtttcttccaaaatatcttgaacagttagtcccatcacctttccaaaatcctttggaccaatttcgccaattttagaaataacgttatttactcggttcagtgtaacgtaacaagctaaaattccaaccaatttgttatcagcttctgacagttcaactttagctttaataggcttatcagactttttcttttcactgaatttagagttcttgcatttgatagctacgcgattgccattaggcatccaagaaggataacaaggtttcaatacatatccttcagcagtaaatacttcgccttttgcttcggcattccaaacgcatttatttgcatcaactaatccagcatggtctaccgtaaaattataatcctggacgacagaatctaaatcatttggcaatttaataagctcttcaaatttaccgcgacctaaaagtggagccattttaaatttaaatgtattacagaatgattccatcatataatcatcgacataagtcacatcaccactttctgtagtaacaataatgtcaaatacataaaaatctttatcaccataatcaacattcttctgaatgccgggtccagcgaattcgccaaagacttgataagatacaaccgctgaagtttccataatatcttgtactgctttaatggaatcagcgtaattctttaaaacaatttcatacccaaagaaatcttcagcaggaagaataggaccagtgcgtttagcacaagttactttatcacgctcaataatcaacgagaaatttgtgccatgaatcttttcacgagctacccattcgccgccagtcaatcctaaactgtaaagtttttcaataaatttagaattgtaatgattttcaagactgctatactttttaaacataattaatcctcaaaatgtaatttctaaccaatcaccatcacgctgatcactattgactttaaagctaaatccttcttttctcagccaatcaccaatttcttcagtaatcaatttatcgcgagcagtgcaataataactaaaatatgttttaccctgttcagctgctttattagcaagttctgaaaaatctttaataaaacactctagcttaaactgtttgcttttaagtgctttttctcgtaattgattagcaaaagattcattttcataaagatcatactgttccatttttcacctttttattaatatgtctttttctatagacaactttttctcgagtctcaaatttattcttagcagtcatagctcgagcccataatacagccacttcttttgcctgtaagttcaattcacgagcaatttcaatgaatgactttccagactcatggagtgtaaacaccacaacctcagttctcataatcaatctcatgttatcgagttggtgccattatatacatcattttatgagtgtgttttgtgtgctttcaaaatgaagaaaggggccgaagccccttatgattatgattatggataggtatagatgataccagtttctaaagcagttttatgaatgatgtatccattacgtgattcttgaacatcaacttctggatagtctttcatcatcttctgaagggtgtaacggtgcaggtagtatttactatctggatcttcagttttccaatctttaccttcttcggtcattttttggatttcatccataacccaccaaccgcaccagatataagctgaagtacgatgtggaagaggatgaacataaggcaattcaccttctggttccggagcaactttatcagttacctgaacttgaccagtcgctttaactgttttactatcatagtcagttgctgtaacgacagcagtaacttcaatagtttgacttccaatagatgaggtgtcaacggtgtatacgttagttgacccttctacaggagaagaatctttcttccatgaataagtaatttgtgctgctccaggtgcgccagtaacattagccgtaaatgtcgccgaagcatcttgctgaacgttaatagaaggaggagtcaatgtaacctgtggattcattgtcttcttattaactgtcaatgatacttcattagaagtaacttccttttcattgtaattttctgccgttacttgggctacgcatttaattctttttactccacttgtagttggagtatagctaaatgtagcggaagttgcttcactaatttgtgaatcatctacataccactgatacgtagcagacgctccatcaggttgagaaaccaaggcagcagtaaattgaactggggttccaattactccagctgaaggactatcaggagttactgccaaggtagttgtctgcgtctttttattaactgttaatgatacttcattagaagtaacgcttagtgcatcataatctgccgcagttacttgagctacacacttgatttttttaactccgcttgtgtcaggagtgtaattgaatgtagcgtcagttgcttcgccaacaggagaaccgtcaacgtaccattgatacgtagcagatgcacttggtggctgtgaagctaaggcagcggtaaattcaattggagttccaatcactccagcatcagggctaccaggagttacagctaaggtagttgtttgtgtcttattttgaactgtgatagttgtagtaactgtagctgtttcaggttcagattctgcaacttgattggttgcaactactttaatagttttttgaccggcaggtccttttagtacataactaaaagttgctgacgtttcttcctgcggagcgtcgtctacagtccaagcatatgtaataggtccatctccagtttgaccactgggtgtagcagtaaactgctgagtctgatctataactccagtaggtgttttaggagttatatcaactgtaaaagccataagttatccttattttaatgttacgaaagaagaattacgtgtttcacgaattagaactgatccgtcacgattaatgtagtaaattaagctaaataaagtttggtgcgccgacgcgtgttcaaaactagttgggtgagatttccaatccggagtttcagcaatccactggtaaatccaccaaggaacagtgcagaatcctggattttttccaatcagctgaagattcggactaaagttttccggaagagtaaatacagacggcttttcagattcaataatctcagctacagcctgctcgaatttttcttcaacaaaaggagtatcttcaatcaaaacatcggtattttcaggaattttatccgtttctactacttcaattttaatgtcagatttaaccggagaatcaatcagaagtgctgcctctggattgacttcttcatcgtcatattttaatccgtctgcggcatcagcagcatcaattaagtctttaatagataacccatcagtctctggcataggttcactagcgagcttctggagagcttcttcaatatcattaacgatattatcaaaagatttattctttttgacctttataccaaactgttcagcatattcagctaatttagctttagcttctttattatcatcaagagccttcagctctgcaatataatctttatctatcataatatttcctcagtataaatatagatatatttattacatggtatttagacatgactgacattaaagtacatttttatgattttagtcacgtgagaattgattgtgaagaaagtacatttcatgaactccgtgatttctttagctttgaagctgatgggtatcgttttaatccgaagtacaaatatggccactgggatggacgaatccgtcttttagattataatcgccttcttccattcggcttagttgggcaaattaaaaagttctgtgataactttggctataaagcctggattgacccacagattaacgaaaaagaagaattatcaagaaaagattttgatgaatggctttctaaattagaaatctattcaggaaataaaagaattgaaccgcattggtatcaaaaagatgcagtgttcgaaggattagttaatcgtcgtagaattcttaatcttccaacatctgcaggtaaatctttaattcaagctttgcttgctcgatattatttggaaaattatgaaggtaaaattcttatcattgttccaacaactgctctgacaactcagatggctgatgactttgttgactatcgtttattcagtcatgcaatgataaagaaaatcggcggtggagcatcaaaagatgataaatataaaaatgatgcaccagtcgttgttggtacatggcaaactgtagtaaaacaaccaaaagaatggttctcacagtttggaatgatgatgaatgatgaatgtcatcttgctacaggaaaaagtatttcatctatcatatcaggtttaaataactgtatgtttaaatttggtttgtctggttcattacgtgatggcaaagctaatatcatgcagtatgttggaatgtttggtgaaatatttaagccagtaacgacctctaaattaatggaagatggacaagtaactgagttaaaaattaatagtatttttcttcgctatcccgatgagttcactactaaattaaagggaaaaacttaccaagaagaaataaaaattattactgggcttagtaaaagaaataaatggatcgctaaattagctattaagcttgcgcaaaaagatgaaaacgcttttgtcatgtttaaacacgtatcgcacggtaaagctattttcgatttaattaaaaatgaatacgataaagtttattacgtatcaggggaagttgataccgaaacccgcaatataatgaaaaccttagctgaaaatggtaaaggaataattatagtagctagttatggtgtattttctactggtatttcagttaaaaatctgcatcacgttgttttagcacacggtgttaaatctaaaattattgtattgcaaacaataggtcgcgtattacgtaaacatggttctaaaacaatcgcaacagtctgggacctcatcgatgattgtggtgttaagccaaaatctgctaatgcgaaaaagaaatacgttcatttgaactatcttttaaaacacggcattgatcgtattcagcgctacgcagatgaaaaatttaattacgtaatgaaaacagttaatttataagggcttcggccctttggagaaaaagatgttactagaatttaaacaatttctttatgaagcttctattgatgaatttatgggtaaaattgcctcttgtcaaacgatagaaggtctagaagaacttgaagcttattataagaaaagagttaaagaaactgaattaaaagatactgatgacatctctgtgagagatgctttggcaggaaaaagagctgaattagaagattcagacgatgaagtagaagaaagcttttaaattaaaaaaggcccaaccaaaaaggaagggccaaaactatagactaaaggtcacactatagcaaaagttgtgtttcatttaattgttcttccgaactttctgaaactggtagttctttaatgtaattataacaaggcccaggatgtacaggacctttgtctgtttcaacaaccaatgcagaatcgattggagttttacagacaacgcaaatcttatctgacatgattgtctcctctaaattatatatctatttatataactctcatatgcatatcaatgcccatatctttagaataaaaatattcatcaagatatccagcaaattttcctttaacataaagtacatcttcaccgcatgggtggtcggccaggatacgaatatcctgacgcttgagattatactttttcattaagaattgaatttcagtttcgaattcttcttcataattaaaagcatcatcaatgctatatctcattattttccagcctcaaatgctcgcatgtcttgaatatgcttaatagcaaatccgcgtgatttaatagcatcaagagctccgctacagaaatccaataaaattccccaatattgtaatgaagtatcaacttttaaaacatccttatcagctgatagaactgtcttcatttctgatttctcataacggtccatactaaattcatcaccatctcctcgtcccgagtagtagtctaatttagctttaagagcaacttttttctgtgcttcaattctaagcatttcctttttaatacttgaatgcttattaagccatttactatataacatcacattattagctgcttcatactgtaatttagtcgaatctataaacacatctttcttcaattcttcttgaagatcttctaatctcatattgttctctattcaattgttattggatggacttagattcattataccacgtttatacgtgaagcattatactctgttactggaagccagttgtagttttatctgctcaatatcatcagggttatcgatgactgaaaagcgtatttctactatcagagtataatcatcataaactggtattacattaactgctaatttatcaatacgtggctcgtagtttcttactgcgctttcaatgttacgctcaacagtatcagcagtaagaggagtcatattctcaaaaagctgatcagataaatcgcatccaaattctgggtcaaatggccttgaccctttcctggttgtaataattcctaaaaggctatttttaattgaccttaatccaagggatctagaaacatctttgtcccaatccattttcatttctgggtcaatgtcagaataaagcttattaatatttgccattacaatagctcaaagaattctttgagtcctcttattacatgagcgtgagtttttccacactctggacacttaattggaacagccaaataaacagtaggctttaaaagcatatcttttatagctacaatatctgactctgtgatgatagagtataaatcttccagttctttttcatttaagtcttcaactggaatgctttcaccattagcatgaatcgtttctatgcatgatactatcatgtgggctatatttttatcatcaaaaattttagggtaatggaacttaattttaatgtcacccagtgtataccagaggtcttctggtgcatctatttgtgtatgtaatagatttatatgagttggtatttcagttccacaggtgcacttccaggagttttcgtgattaacttctccaagagaatgtgcccataaatgaatcagcagtagttctgattcttggcggtttaaatcttttgcatttgtgcagtctttaattagctttttaacgatctcttctactgaaccgttctttttagcagtaataagttctagatattctttaagagtaaatgcgcggcagttgattattttagaaccaactctcacgtcaaatttgtattcatacatatttagctcctttatttatcatatttataaatagaataaaaggagcatctatggcaaacattattcgttgtaaattaccagatggtgttcatcgttttaaaccatttacggtagaagattatcgagattttttgttagttcgaaacgatatagaacatcggtcaccacaagaacaaaaagaaataattgctgatttaattgctgattattttggagactatccgaagacttggcaaccatttatatttttacaggtatttgtagggtcaataggcaaaactaaagtaccggtcacatttgtatgcccaaaatgtaaaaaagaaaagacagttccatttgaaatatatcaaaaagaattaaaggaacctatttttgacgtagctaatgttagaattaaattaaattttccttctgagttttatgaaaataaagcaaagatgattactgaaaatattcattctgttcaagtagatgaaatatggtatgattggaaggaaattagtgaatcaagtcaaatagaacttgttgacgccattgagatagaaacattagaaaaaattctcgatgcaatgaatcctattaatttaacactgcatatgtcgtgttgtaataagtatgtaaaaaaatacactgatatagtagatgtgtttaagctattagttaacccagatgaaatatttactttttatcaaattaatcacacacttgtaaaaagtaattatagcttaaattcaataatgaaaatgattcctgctgagcgcggattcgtattaaaactgattgagaaggataaacaataatgagtatgttgcaacgccccggatatccaaatctcagcgttaaattatttgagagttatgacgcttggagtaataatagatttgttgaattagctgctactattaccacattaactatgcgggattctctttatggtcgaaatgaaggaatgctgcagttttatgattctaaaaatatccatacaaaaatggatggaaatgaaataattcagatttctgtagctaatgcaaatgatattaacaatgttaaaacacgaatttatggatgtaagcatttttccgtatctgtagattcaaagggcgataacatcattgctattgaattgggaactattcattccatagaaaatcttaaatttggtagaccgtttttctctgatgtaggtgaatctataaaggaaatgcttggcgtaatttatcaagaccgtacgctattaactccacctataaatgctataaatgcttatgttcctgatattccatggactagcacatttgaaaactatttgtcatatgtcagagaagttgctctagctgtaggaagtgacaaatttgtatttgtgtggcaagacatcatgggagttaacatgatggactatgatatgatgataaatcaagaaccatatccaatgattgtcggtgagccatctttaataggtcaattcatccaagaattaaaatatccattagcatatgatttcgtttggttgactaaatcgaatcctcacaaacgtgacccaatgaaaaatgctactatctatgctcattcatttttagattcttcattgccaatgattactacaggaaagggcgaaaactctattgtagtgtcaaggtcaggtgcttattctgaaatgacttataggaatggctatgaagaagctattcgtcttcaaactatggcgcaatatgacggctatgctaaatgttctactgtcggtaattttaacttgactcctggtgttaaaattatttttaatgatagtaaaaaccaatttaaaacagaattttacgttgatgaagttatccatgaattatccaataataattcagtaactcatctatatatgttcactaatgcaacgaaactggaaacaatagacccagttaaggttaaaaatgaatttaaatctgatactaccactgaagaaagtagttcttccaataagcaataaagaagtttctattcctaaaatgggtcttaaacattataacattttaaaagatgttaaaggtcctgatgaaaatttaaaacttcttattgattctatttgtccgaatttatcaccagcagaagttgatttcgtttccattcatttattggaatttaatggaaagattaaatctcgtaaagaaatagatggttatacttatgacattaatgatgtttatgtgtgccaaagattagaatttcaataccaaggaaatacattttattttagacctcctggaaaatttgaacaatttttaacggtgagcgatatgttatccaaatgcttgcttaaggtcaatgatgaagttaaagaaattaattttcttgagatgccagcattcgttttaaaatgggcaaatgatatttttacaactttagcaattcctggccctaatggtccaataactggaattggcaatattattggattatttgaatgaaaaagccacaagaaatgcaaacgatgcgtagaaaagttatttcagataataaaccgacacaggaagcggctaaatccgcttccaacactttatctggacttaacgatatatctacgaaattggatgatgctcaagctgcttctgaattaattgctcaaactgtcgaagaaaaatcgaatgaaataattggagcaattgacaacgtagaaaacgcagtgagtgatactactgctggttctgagttaattgctgaaactgtcgaaattggcaacaatattaataaagaaatcggtgaatcgctcggaagtaaattagataaattaacaagtttactggagcaaaaaatccagacagctggaattcaacaaactggaactagtttagctacggttgaaagcgctattcctgttaaagttgttgaggacgatacagctgaatctgtgggtcctttattaccggctcctgaagcggttaataatgatcctgatgctgattttttccctacccctcagccagttgaacctaaacaagaatcgccagaagaaaaacagaaaaaagacgcatttaatttaaaattatctcaagctttagataaattaacaaagactgttgatttcggatttaagaaatccatttcaattactgataaaatatcaagcatgctatttaagtatactgtcagtgctgctattgaagctgctaaaatgactgcaatgatattggctgttgttgttggaatagatctgctgatggttcactttaaatattggtcagataaattttcgcaggcatgggatttgtttagtacagactttactaaattctctagcgaaaccggaacatggggtcctttattacagagcatctttagttctatcgatgaaattaaaaaattctgggaagagggagattggggcggtttgacggtagctattgtagaagggcttggaaaggttctttataatttaggagaacttattcagcttggaatggctaaattatctgctgcaattcttcgagtaattcctggcatgaaggatactgctgatgaagtagaaggaagagcactagaaaatttccaaaattctactggagcatctctcaataaagaagaccaggaaaaagttgcgaattatcaagataaacgaatgaatggagaccttggtccgatagcagaaggactagacaaaattgcgaactggaaaactcgtgcatctaactggattcgtggcgttgataataaagaagcactaactaccgacgaagaacgcgcagcagaagaagaaaaattaaagcaactttcaccagaagaaagaaaaaatgctttaatgaaggctaatgaagctcgggccgcgatgattcgttttgaaaaatacgctgattctgctgatatgagtaaagactcaacggttaaatcagttgaagctgcttatgaagaccttaaaaaacgaatggatgacccggatttaaataattcaccggcagttaaaaaagaacttgctgctagattttctaaaattgatgctacttatcaagagctcaagaaaaatcagcctaatgccaaacctgaaacttctgctaaatcgccagaagcaaaacaagtccaggtaatagaaaagaacaaagcacagcaagctcctgttcaacaagcatctccttcaatcaataatactaataatgttattaagaaaaatactgtcgttcataatatgacacccgtaacgagcacgactgctcctggtgtatttggcgcgactggagttaattaaggaataatatggcaattgttaaagaaataactgctgatttaattaaaaagtccggtgagaaaatttcagccggacagagtactaaatcagaagtagcaactaaaacatacactgcccagtttccaactgggcgtgctagtggtaatgacactacaggggacttccaggtaacagatctatataagaatggattattatttactgcatacaatatgtcatctagggattctggaagtcttagatcgatgagatctaactactcttcttcatcttcgagtattttaagtacagctagaaacactattagtagtacagtatcaaaactatcaaatggattaatatcaaataacaattcaggaacaataagtaaagctcctgtcgcaaacattcttttaccgagatctaaatctgatgttgatacatcatcacacagatttaatgatgttcaagaaagtcttatcagcagaggcggaggtactgctactggtgtgttaagtaatattgcttcaactgcagtatttggggcacttgaaagtataacacagggtataatggctgataataatgaacagatttatactacagccagaagtatgtatggcggagctgagaatagaactaaagtgtttacatgggatttaactccacgttcaacggaagatttgatggctattattaatatctatcaatattttaactatttttcttatggtgaaacgggcaaatctcaatatgctgctgaaataaaggggtatttagatgattggtatcgttctacgttaattgaacctttatctccggaagacgcagctaaaaataaaacgctatttgagaaaatgacatcgagtttaactaacgttttagtagtttcaaacccgacaatttggatggtgaaaaactttggtgcaacttctaaatttgatggaaaaactgaaatatttggcccatgccaaatacagagcatcagatttgataaaacacctaatggtaactttaacggattagctattgctccaaacctccctagtacatttactcttgagattactatgagagaaattatcacgttaaaccgtgcttctttatatgcggggactttttaatgtattctttagaggaatttaataatcaagcaataaacgcagattttcaacgtaataatatgtttagctgcgtttttgcgacaactccatcaactaaaagctcttcgttgataagttcaattagcaacttttcttataataacttgggtctaaattcagactggttaggattaactcaaggtgatattaatcagggaattaccacgctaattactgctggcacacaaaaactgataagaaaatcaggggttagtaaatatcttattggtgccatgagtcaacgtacagttcaaagtttattgggctcatttacagttggtacatatttaattgacttctttaacatggcatataactcatctggattgatgatatactctgtaaaaatgccagagaatagattatcctatgaaactgactggaactataattctcctaatattcgtataactgggagagaattagaccctttggttatttcatttagaatggattcagaagcttgtaactatcgtgcaatgcaagactgggttaactctgttcaagacccagtaactggactacgtgctttgccgcaagatgtcgaggcagatattcaggttaatcttcattctcgcaatggattgcctcatactgcggtgatgttcaccggatgcattccaatatcagtgagcgctcctgagctatcatatgatggagataaccaaataactacatttgatgttacttttgcgtatagagtgatgcaggctggagcagttgataggcaagctgcgcttgaatggcttgaatctgctgctataaatggtattcaaagcgttctcggaaatagtggaggtgttactggactatctaattcactttcacgactcagtagattaggtggaactgcaggaagcatttcaaacattaatactatgacaggaattgtcaattcgcaaagtaaaatattaggagcaatataacaacggggacctttcggtccccatatttttatttgcggaatgaaatgaaagcagaaactgaagcaactaaactgtcttcaatataaacttcaatttttaccggagcttctgactcaaatttacctgttactacaccctgaaaaatactttcagtctgttctggctttgaaaaattttcagaaggaaaaattccgaactttttatctgttccaaaaattttaataaattcatcgtaaaccgcttcgttaaaagcattatcagcaggaataacgccttcaactacaagttcttgacctaaaaagcgtaaagaagatttcattttgtgttcctcatgttatgtcagtaagactactataacacaacacgagggacttgtaaactacattttgaactttttagtacgcggaataggcatgcgtcgattttatactgtttcattgtttgaagagcagtatcaaaaacagcattaatgacaccaattggatttccactcaagtttttaagcttaactaatgatagtttctcattaacacctatcattacgatatgcatcattttatcgcctggtttaacgttttatttgtatcaccgtcagaggtgtatgtacaaaatctaaatccaggaagtacgctttcttcaccggcttgaatagcaaaaatttgaggtattttatgcttaggatttaagttaacaaccggcgccgaagcgc

SEQ ID NO: 15 - protein, 188 aa, unidentified
  REGION 1..188: note = the amino acid sequence of an endonuclease protein of a bacteriophage
MEHQELSSAAQDADSKVLGRARRKKSPDIDYLRRALIYDKETGLFRRAIKTGRKANVGDVAGCVDKDGYIQIRLKGKMYPAHRLAWLYVYGEWPQDEIDHINCVKGDNRISNLRIATRRQNSMNLKIYKSNKTGVKGVYWHSKRKVFVAQIRANGKRFFVGNFDDVLSASQAIERWRSELHGEFSRSK

SEQ ID NO: 16 - DNA, 567 bp, unidentified
  source 1..567: mol_type = unassigned DNA
  misc_feature 1..567: note = the nucleotide sequence encoding an amino acid sequence of an endonuclease protein of a bacteriophage
atggaacatcaagagctgagttctgctgctcaggatgcagactcaaaagttttaggaagagcaagaagaaagaaaagtcctgatatagattatctcagaagagcactgatttacgataaagaaacagggttattcaggagagcaataaaaacaggaaggaaagctaacgttggagacgtcgctggatgtgttgacaaggatggttatatacaaataaggctcaaagggaaaatgtatccagctcacaggcttgcttggctttatgtttatggtgagtggccacaagatgaaatagaccatataaattgcgtaaaaggagacaatagaatatcaaaccttaggattgcaacgaggcgtcaaaactcaatgaatttaaagatatataaaagcaataaaactggggttaaaggtgtttactggcactcaaaaaggaaagtttttgttgctcaaataagagcaaacggaaaaagattttttgttggtaattttgatgatgttctaagcgcatcgcaagctatagagcgatggaggagcgaacttcacggggaattctcaaggagtaagtaa

SEQ ID NO: 17 - DNA, 47638 bp, unidentified
  source 1..47638: mol_type = unassigned DNA
  misc_feature 1..47638: note = the genomic sequence of a bacteriophage
ggtaattgcccgttcattcgagcaggttgaaaaagttgcgactgcactttctgctgggaataaaggtgtaattacagaagaaatgctgatgtggtcattctgttttgtttgcgaaagcctgacagatgttatgagcatgctaaaagtgaacgagagccaggaagaactcggaacaatggccagatggaatgagattaaaaatagaattgagaatatcctttctggaagaacgaaggatgacaggatgcctcagtctattctcgttcagagagctgttaaaacaaaatccctcaaggctcttgctgaggcaatagcaaggtctaatggggaagatttttcctatggagcaaaaactcttgttactccagtaatacaatcactcatggcctctcgtgctattgatgctgtaggttgcggttactggattaacgacgcaagtaaatttgaaggaacgaaaatgagcgttaaattcacgcaaattgttgatggtattggcatgaatatggctgcagtgaggggttggcgatgaatatagtgattaatgaaaatgttgttaactgttatgcaacagaaactagtcctggtaaagttgatttcacattgggcgctgcggattgtgattggtttcatgatctgtttttcccatatggagactctcaagaaggcattgaagttattagcggtattttttgcttcaaagacgtgcatggcaatggttggagaggcgtcttgattggcatagatggacatcatactggtaaaaagtatcagattcacacgtctggagtcggggaaacaaaagacaaggcagtaaaaaacacaaggcaattgtggcttcgtatacggaatgaaattgagcataaacgcagtgagggtgtgttttgatgagcgccaagaaaaaactcaagtttcttattcacaaggcgatagctctaaaactgtatgaatatcgacttttttttcttgagtgttcagtatctccttgtggatatggtgattatgattactcaatttccattggtgaacgccgtggatggcttgagacgtttaacactctaagtattggtaatgattgcgagaaaataaataattgcttgtgctggagctgcggcgatggtctttttagggctgtttacatagatacattttgtaagatgggagacataatcctttattcaacagctaccggtgattcaaaagacagagcttcgcttgatgccatttatgcatggaggaatgcaaagcgagagataataaagattattgacgatgaaattgacaagatgaaatgctaataacaaaaaccctccaatcggagggtttcttttatctgctgattgacattttctctatcagctctccagcgtcataaatctttctcctgattatcttcgccatcctgattgtgtcagcatcatctggtagcatcaccggaagacctgcattttccgcagcacacagttcatcaaatttataattaactatgcaacgcaacctatatttcacctcatcgctaacagaacgcaccacttcccacatgttttccggcgaccagcagcaccagacatgcgcgccagtgaagtaatggcatttccacgcatctgcataaccagataccaggtaaatgaactttccgttatcttctccgattgggcttatcgcgcctcgcgtgagttttccattgatggctgagtctttgttgtaccctgctttataaaatgttctgaatgaatcgccattcataccaatgaatgccacgttgcatggcttcattgtgtcagcgcgaaccatctcaaccgcaataagctctccagatttacctctggcgacattaacatcgcaaccaatgccatttatcaacgtccactcattcatcgctacacgcgtagttttagccatgattgcggcgacttcctgctcagtgatgaagtcatcgttgtgatttatcttcggtagctctttcctgattgcatccagcttttcgcgtgggttcatgttcaggaatccactaagcgcctccagtgcttcaggaaaactcatgccggagagtttcattagccaggtgattccgctgccgctgccgcactggttgcatattgcgccaccatctccttttgtttcgaagttatcatcaaaacgatacctgtctttgccaaggcatgatgggcacggctggtgctttccattgaaaactctgctatccacattgacgatagacatgatggctgcctgccagttatttctcattagaggctcgatttccttccagtcgtacttcataaaatcttcctgttgacgatgatgtagattcattgtaatttactcacatgaaacgcgcaagcgttcttgacatgaaacgcaactgagtttaacatcgaggataagaaatggctatcactctgaaaaagtgcaaaaactgtgggggagaattctatggaacatcaagagctgagttctgctgctcaggatgcagactcaaaagttttaggaagagcaagaagaaagaaaagtcctgatatagattatctcagaagagcactgatttacgataaagaaacagggttattcaggagagcaataaaaacaggaaggaaagctaacgttggagacgtcgctggatgtgttgacaaggatggttatatacaaataaggctcaaagggaaaatgtatccagctcacaggcttgcttggctttatgtttatggtgagtggccacaagatgaaatagaccatataaattgcgtaaaaggagacaatagaatatcaaaccttaggattgcaacgaggcgtcaaaactcaatgaatttaaagatatataaaagcaataaaactggggttaaaggtgtttactggcactcaaaaaggaaagtttttgttgctcaaataagagcaaacggaaaaagattttttgttggtaattttgatgatgttctaagcgcatcgcaagctatagagcgatggaggagcgaacttcacggggaattctcaaggagtaagtaatgcacaaaatagacaagatgatttcagagattgacattaacttgctgaaatcctatctggatactggtgatatcgagccaaggccttatcagtggctgatatataagttaactggtgatgtgattcgtcattatgttggccctagttatgtaacagcaagcgtcggtagcggaaagtcactgatgattgccatgatagcaaagcgttttcaggaaatgggttactcagggatgattctatcaagacagggcgaaatagtggagcaagatgcggaagagctatggtcgcttggtgtaagaaactcgctattcagcgcttcgttggggaggaaaagttctacgtatccaataatttgtggttctgagggtactgttgtaaatgctttgtttgataaaaaggatgaatcagggaatgttattgcaaaaggtgcgctttctgacttttgcccgagatttctgctgatagacgaaaatcatatggttaatgacattgatgttgttaatgatggtgatacgcagtatgcagtgataattaatgagctaatgaaaaggtgcaaagataagtacggccatgagttgagaataataggttatacaggctcaccgttccgcggcactacatcaataaaaggtgctttctggaagaaagagattatcaatatagacaccaagtacatggttgaaaacggttttcttgtgccaacaatttttggtcttcatgatgttgacagtctgcattatgacctttctgattttcatggttcagatgttgatggtactcaggattttaccaccgagcagctcaagcagatgcagaaagaaatccttgagcaaggaactcttacacagaaaatcatgctcaaggttatggagctgacaaaaaacagaaacggagtattgattacatgtgctggcaagaagcactgtcaggaggcggcaaaatacctacctgaaggaagctattcaatagttacagaagatatggggccaaaagccagaaggaaggctctaaaagatgcatacaccgggcgcaaaaaattcacattccagatagcggcccttaccactggtgtcaacattccgctatgggatacgagctgcatattacgaaaaataatgtcgctaactctccttgtccagcttcttggtcgcgggatgcgcttgctgaagaaagagcaaattgacgccgggtatcataaagaagaccatctggttctggatttctcaggcacgatgtttgagcttggtcagctgtatgaagacccgattcttgaagaggctgaggcgcaacgttcaaaacgcagtggtgaacaggttccgtgcccgaaatgcggaacgatgaacagtccatatgcgcgtcgctgcattggcaaagatgcattgtcgccagatggtcgctgcgaagagtttttcagttatatccgttgcggtttcgataagcacggaatcagaatttttgatgatggttgcggcactaaaaacgaccctacagctcgctattgccgacattgcgatcacgttttgcgtgaccctaatgcggcactgaatgagcgtgcgtatacggataatgaatggactgatgttaaagacttcaagattgaattaacgaaagatgaaaagggtgttgtttatcgttatttcattacaaaagagaatggcaaagatgggtgggctaatgaggtcttttatccttttgggagacaagagaagtatctgaaaaatcagttcaagattaaaggtttgttaaatcatgtgtcagacaggaatctgattgataaccttatgaattgccacagcgcaaaagcattcatggcgtttactggccttatccgtgccccaaagcgaatcacgcaccggtttaacgataaaggccgtgacataatccacagaaaagatttttcaggagagaatagtgaaaaagcgattcaagcagcatgagttgagtgacaaggtattaatttttgatgatggttaccgcggcgagtgtccgcatgaggattcagatttgatagcgttcaagtggtggatggattaccggtttcctgatgtgctgtggttccatccgtctcaggagactaaaagcaactccgtgcagcatctggcatcgcgtgcaaggaagggtgtcaggtcaggggtgtctgatgtgataatcctgactcctggtggtgagtggcataaagcgacgatagagttgaagcgccatgattcaacgcttagcaaatggcaacccggacagataccgtttctcaatgatagcgccagcgctggcgcgttctctgcggtggcgtgtggactcgaccagataaagattgcagtgttgacgtattttggcttgccttttgatgtggattgatgtagattcaattacacaatgacaaatgaggtgatgaagatggatattgagattcctgatagttttgatgcggagtggcaatgcgaaatgttacgaaatcttcttgttaagttgaacgaacttgatgatggaggttatgttgtcagcgatggttattcattgcttgatgatgcaatgaaaattgtcgaagcgctacgtgaatacagtggtgattaaatgaaagtctatttcaataatgaattaactaatgagcaataccacgctgacaccgagcacatcaacggctctggtttgtggaacatttacgacagatgtcccgcggcatggcgctacaaagacgaagaagatgagcaatcaaaagctcttgtcttcggaacaggaagccatacagctctgcttgaacctgagcgtttcgaagaggaatatgcacgtatgccggttgtagatgattttccaaaagacaaagatggaaaacccacggtactggtaactaccgccgatatgaactcatgggcaaaagagcgaggtatcaaaggactctctgggaagtcgaaagctgatgtgattaaaattattcaggccactggagaaccagtgaagatttacgatgttatccgtgaagaagctgaaaaagctgcggctggaaagcagatgctggagggaggtgattatgacgccattcagcaaatgcgcgccgtaatacacgcaaacagctattacagcagtcttcttgctggtgcttatgctgaagtgtcaattctcggcgaacttaacggagaaaaagcaaaggttcgttttgactgtctgacaaaaggtggagacatcattgactacaaaacggcagtgagcgccaagcctgatgagtttttccgtcatgctgcgcgacttggctactttatgaaaatggcaatgcaacacgacatgtttgttgcggcatacggtcattcgccgcgttcggtaaaccttttagttcaggaaaagaaagctccgtttattcctgctttgattcgtttaactgaagagcaattacgcataggtcgcattcagttaaatggcgcaatggaaatttacaaggcgtgcaaaaaagccaattcgtggccgggatattcaatgggtaatcccgtcatcgaaatggaaacgccggaatggttcaaaaaacaatttaatttataattaatgaggtgatgcaaatgggtattctcaatattaaaccagcagaacgttcaggttctcgtgtggtaatcggtatttcagggcagtctggtagcggtaaaacatatagtgcacttaagctggctcgaggcatggttgattcaccagaagaaatcggatttcttgacactgaaaatggtcgcggtcgcctgtactcaaacatccttgatggtaaattcctgcacgctgatatgtacgcaccattcagccctgcacgttaccgtcaggcaattgaagaatttcaagctgctggcgttaaggttcttgttattgattctggctctcacgaatgggaaggggaaggaagttgcacggagattgctgaaaagcctcttcttaacggtaaaaagatggctgactggaagcgcgccaaagctgaacacaagaagttcatgaacgccatgctgcaaagcaatatgcatatcattgtctgtcttcgcgcccgccagaaaactgatttcgcaaacccgaaagagcctgtatcacttgggttgcagccagtgtgtgagaaagatttcatgttcgaaatgactgtaagcatgatgatgcacgatggaggtaaaattcaggagttcaccaaattaccagaagagcttcgcccaattttctttgaatctggccgtgaaagcgttcgacatggatacattggcgaggcacatggtcgcggactcatcaaatgggttgactctggcgttaaagttgacgaagaatttgagtcatggcgttcacgacttcagctttcagcagcaaaaggcatggaaggcttgaaggaagaagcaaaatcaatacctgataacctgaaagataagattcgcgcaatatggccgtctctcgctgcttcagccgcagaatacgatcgcattgagtctttcatcaatgatgagcaattatctcctgtggcaatcactccgcaggataatttcaaccctgcaaaactggctaaaccacaaacacaacagccagagccgcaggaagaaacaaaaaccgaacataaaccaactccaattgaaggattttaataaatggcacgcggcgtaaataaagtaattattgtcggcactctcggtaacgaccctgaagttaaatattcagcatcaggttctgcaattgccaacctttctgttgcaacatctgaacagtggaaggacaagcagacaggagaaaagaaagagcagactgaatggcatcgcgtggccatcttcggaaaacttgcagaagtagccggagaataccttcgcaaaggttcgcaggtttacatagaaggccagcttcgcactcgtaaatggtctgacagcaacggcgtggaccgatataccacggaaattgtcattccacaaatgggcggcgttatgcagatgcttggaggtaaacgagaagattctggtcagcaaccacgccagcaatcagggcaacaacatcaaggcggatggggaacaaatccgcaacaacagcagcaaccaaaacaacaaagccaacaaggaggtaatgagcctacaatggacttcgatgattcaatacccttttgatgataaaactaaccccgccaaagcggggcataagttacttattacacagataacttcatacgtgttttacttccatcagggagtcgtatcaaagcccacagtgcacccgcatctaagtacaaggacattgtattaatatccaacacaccttcatccggtaatactgtaccagaaataggtagctcagttgtcttataatctcctcggttaatcttgagagatacagcattaggggttgaaccagagagtgcagttaactcagtccatgctgaaccagaaccagcataaccgttcagatgggaacgtaaagcaccactatccagagtagctgacagcttgttaatacgtagagccaactcagcagtatcactactgaacccgatgactctagactgacctaatactgggtcaagtaagttaccaacaagaattttatttggaggaacattaccgaccaacccacttattgtggagtttggtgcactgataaccagaccatttgatggttgtggtttaatcccagcagccctaatcccattaacaatacaatcacctataatgataatttggtcagaatcaaaattaaggtagttacaatcaataactgtaatgttagaaaatacacggttgtaagtatgtgcaagcatacctgcaccagcacaatcctgtacggtaacgttagaaacatacccaccacgaccatccatacctaaaccaacaccaagtgagttcataacaagaatattatcaaccaaatggttattgggcagttggtggaatggatattcagatacaggtaaatccccaggtctatccggttctggtgccatacctgggtcagaacccaagtcaaaaccatcccaaacaggagacaatgcaacagaatccctgaactgtagattatagttacgtgcagtaccaccaccaacggaaccctgataagtcttgaaaccagactcaccagctcgccatgatgtaacaccaataactccaccattgtgggattcaccaccattatttctcaggaactgaacaccactaccagaaccataatgaacacgtccaccaataacataattacctaatccccaatcaccactaaggttctcaaaggtaatgattccatctttaccaccaatgatgctatctgaatcaattaccttgcagtgatgacaactacggaaaaggtaagcagccataagaccaccagcatttcttatttctactcggctggcactgcgaatatctagagtggctgtaatatgttggtctttaacgttctgtgggagtaatgcctctaatccagggaatttaacccagtcatttaccccaggttgatagccttcaatctttgattgcttcagcgttgcagcaacaagggcagcatctgtaatccatttaccatcagcatcccacgggaaaatgacccatggagtagtcttgctctccatgaatggttgattaattaccgagcctggccccatattattaaagattaaagccccatctccaataaacttagccttacagttaatggttaaaatcttaccaccaaaatctacagactcaccatctgtgaagttgtaattgatatcaataagcaatccatctacggctgctgttgctgcttcctgcaaggtagaataatctgataattttactgaatatttgaattttttgttggcttcctgtctaaatgctgcatcaccaacactaacccacgctcctaatttaacctcaccagtgctatctggagttgaaccagctggcactactttggggaactccccatcccagcgataatattctccatttgcttcataacgcagtgtctgattgggaagcgtcagcgttgcaccatcctcgaagctgtccatcgtaatgtagccatactttcgaatggcttcttctgcggttaattgaaatccagcgattgtccagcgttttacgccgaatctgtccacgtagtaatgcgcgccagagttgacaacttcgtcaatctttccggcattaaacttcaggtcgcgcgggtcttcgcttggaattggattattggttggtgtggtagccattataataaatgctcctttgtgaatttgatgtatattgtatcacgatgacgggatgacatattcgtacatgtcatcactgtattcgctcatggtcagagttgttgtaccgtcacttcctggatttttctggctgacaacccacagagtggtatccagttctttttcagtgctcagcacatagcgagattcagattgcacgcttgctccatcccatatattcagctggaaatcagtcggcaggttgcaggtgaatgtatgcaatccggtcactgttgctggtaatctgtctgatgtgctgccatcagaactggtaatcacaacataaagattatcatcagccgttagttgctcgcttgttgtgaatacgtttccgttgcgcgcttcaataacgccagtctgttgcacatcatcatacatatcgacaacctgaatcatgtcaccaacgttcacatattccccatcagaaagagccttaatctccatgctacgacgggagtaaatcaggcggcgacactcaaggattgccctgtcaacagcctgatatcgattgcgaacataaagcatgtcgaatttcttggctttcgttggttcgccttcgactattccgctatcggtaattcggtagtaaacgttggcttgcttattcgttgttgggtcgcggtattcgacgttaaccccgtcataagtccctggaaggctgatgtcgtaacttaacttgtatccgtcgctctgcgtgtttctggtgttaaatactgttgctggatattctcgtttctcatcacgcgaaaagctcatcacgccatcatcccagaatgcggtgactcgtgctgcgtcgcagattgtttgcaggcgttcgccaatacttttatcttcatcatcgaatgtatagtcgaaacaaccaagtcgctcatcaggcaggctgtcggcaatttcatacagcttcactatgtcgatcgtgttttctggatttccagcggtaataagccagttatgcagaacagcatcagcaaagctacgggatggcgcaagcgtgtagcgcacagttccagtgtcgcgattatatccgatggtgtggcgtgtaattaacgcattatatttcctgtcacggctgccagtggcattttccgtagcgcgcacaaccaccttaaccaccgtgtcatctggatatgagacgtttgttctcgtgacgattgagtgaacctcctcaagctgaagaattgaagtgtcggaactgttgtttgtccgtcgcatctggatcgcgtagcgaccagtaccagcagatggtgttaacttgatcgtgtagtagaacgtatcatttctgtccacgtcctgataatagttcatcgactgatatgtcccgggaatctgaacgttatcatcgtcaatcttccaccactcaatgagtacgctgaaatcattgccatcattggtctggtgttgcaggtgaacccaaagctgatcaccttcaattggcgagaaatacggaccagaaacaatggcttgattgtcagaaatagtaaagtaattattgttaatggttactccatccagtgatgatacaagttgattgccagagtaatctatattggtaattataaatgtgtaccagtagttttctggcggcacacctccgtcgtcagtttctgttgctgatatcaaccttccagacaatgttatatctctggtgacagtaaccccacctactgtagggaatgatacgttaatgccaaatgtaacatcatgcggcaatgtcagatcaacgaaataatcaaaatcatcgttttttggtatcttcgcaaggaattgtccattgacgtattccatttccgttaccgtggttgttgttgcagtttcaatgaccactggcggagggtaggtgttaagttcgtttggcccgtagagctcctgcccatcaacatcatcaaatgcgtaaggttcatgcacaaccggaataacctctcctggctgataaatggtgtaactcgcgccagccagagagccgaggtttgactcagagtaacgcacagaggaaacatcatatttaccgaggccaaaattcatgaactcggtcacgtacttaatattgtttacatattcaaacaatgattcctgaagcaaatcaggaaacgcgcgaatctgcccgaaattatcaggacgcgcctcgccatttcgcgcaatgttcgtctgcgctttaagactggtattcggtgatgtttttgagctggtatcagtttttggtgtggataccttcggagtgagaaacgagaaaatcttcgttactggcttcagtatcgcgccgataaggtcgccaattgcgcctgatggctgacaataaatattgaccacgtcgccatcgcgcaggcagaaagaaagctcatcatcttcaccaagcactctgccgtttaccgcaattgaaatgctggctggcaggtttgatttatccagccacttccacaggtttgtgcccgccggcacaattcctgtttctttcggcgtgcccggtaccttctgaacatgaattactggcataggtgagaaaccttaactttgttgatattttttcgagtgttcgcagcctgtcaaatctgactgccgttttctctcgcgcatgaagtattctatcacggccccatatcatggcgatgtgcacaggaacgttcccgcgatatgccacgacaacatcgccagttactggtgattgcgtgtccttccagaacgtcacctcgctatcgaaacaggtaacaaaagcgccgccattgtcgtagctatcgtcatgatgaatattgatgccacggcacaggcggtaataaagaaccaccagcccccagcaatcaacggcgtcaacatggcaacatctgtccttgtacggcttgccaaacattaactgcgcaaattcttcatcagacattacgcagcccggggaattgagcgatgtcataaagttttgccacgtttcctttgattgggtttttgattgacagggtcacggtaacgtcagaaccatccattgccacatcgctgacatacaggcgatatggcttcagtggtgtgtttgtgtcagtttcttcaaatcgctgatacagtgcgctgattggctcaatacgaccggaaccagtccacaatttaaggtattgcttgaaatcattcgccagacgtgcaaacttgacggttgcgttaatggctggagtgttcgactgctgagactgtgtgatgtccatgcgcactggcagataagtttcaccgccaagcactatctcatccagcacgttagccacaagccgcacataaccaaaagacgagtggtaaaacgttatcgtgtcgaataacgcccagttagggcgctttgctttgtaatcgcgtaatgatggcattattgatactccagcaggtcacggttaacgacttcatccagccatccaaaccatctgtaatccagttcaaccagaacatcatcaaactcatccatcgtgttattgagtttcttagcgataacattgccagtccatgtgaccacgccgccatcaatgctggtttgcacaggataatcggtaaagtgcagcgtctgctcctgtaatccgctgccgccgaggtcaatcatcatggtgaaccagttgttacacttattcaggtagcgtgagctacgcaaccactggataaacgctcgttcttccgccagcgtaaaaacccacgtcaggctccatgttactgcgacgtcagtcgttaatttttgaaatattggtgccccaacggctggggtatccttcctgaaaggggtttgaaacgtaaggtttttgctagctctttgcgccaaaggcagccagtcagggtatttgactatcatgtggaatcctctttgctttgttgatgtattttagcacggcgcaagtttcaccactccatcatgagctggtttaaaatgcattcgttccatgatgttttgccatctaaaatagcttgcaaaaattctacatttgaatgtagaatttaattgtcacattaaacaggagaaataatcatgaaactgcaaacattagagttcccgtacggagagatcactttcgaccgtgaaaattttattaacgttaatgagcttgttaaccagatgaaccgctggagactggataatgggatggggacaagagaaatacgacaggtaatggcaactgatgcatttaaggatttcaaggctgagtgcgaaaagcaacttggtatcgatagcgcaataaaatcaacgcgaggcaggaatggttccacttttgcttgcttgcatctggctgtatatatagcagagcaatacagcacatatttccatttccttgtcatcgaccgattcattacgcagagacaggttgagttgcgaaatattggtgcggtaagtttcgtggaacttaatgctgccgtcagcagaatgcttgaacgcactgagggtagaattggtcatagtgggcatttcattcaggtggcaaagtcagtcaaggagtcgatagatatccgtgaagttactgggtttgacacatgggactctcaggatgcaaaaactaaccagttacgcagtgatatccagaagtctcttgtcacacttctggatatggaagcggtcaactcatgggatgaactgaaagaaacgataccgagggtcgtacgtaaatgcgctgataagatttaaaacaaagccccataaggggcttctttttactctgttgctcgtctgttggtgttgtagtttcttgagatggcttgccctattgggccattttccgaaatatcactcacaatcgtctcaattgtcacgctgccgtccccattatctctggcgctgctgctaacctgcgctgagctgttgttgataacgctattataaaccacaacaccgccacctccgccggaaatatccttattgctgataacctttcctgagttgccagggatcatgtattgcctgcctgtgctcgcctggaatatttctggtgcatttccctcgcccacttcatacatgcttcctgcgctaacagggccgccattcttgcgcttgccagcaatacccatcgccagtgccccaaggacagcgcctacaccaattgcagctgcgccgccgaatgaaccgattgacgcaacgattgcagcgggggtccatgccgccgtcgtggtggctgcagccgcagtggaggcagctgtggtggttgccagtcctgccgtttgcgccgccgttgtggtagcggttgctgctacctgagctgtctgccccataacagcagatttcacccactgcacacccatttcaacaaagctgtttaccagagagttcagcaccgtagagccgaggctgcgcatggcatcctgaacgctcattgtgcctgtcagtaatccggtaatgctgtttgacgctgtgctcatcgctgaatcaagagcagtgccgaacagttgcgctccgaggctttgttgctgccattcagcccacattgcatccattctctgctggcgatattgcgcttcaattgctgcgcgagtctgttcaatctccgtgattttttgcggatatgctgcggcgtaggcatcaaggtcagccatgcgttgctggtattcactgtcaatgccagtcgttggtgacgcaatggcacgcaatccctgatatgatttctctacgcgctgcttttccttctccgcttccgcctgttccttcagcgcattcttctggtcccaaatcttcgcagcgtactcgccagccagttttatttgctcctgagtggctgccttgccaagcgattgctgcgcgttgagaattgcttgctcgcgtgatagttcgctggtagacgtggcattgagcatggtttgctggcgtaatttctccagcttctgtgacaccgattcctcaaggtttgcttgttttgtcgatgcagctatgcgttttttatcttgcttttcctgctctttttttgcggcaagttcagctttgtaagcctctattttgtcgaatgacgcattgattgtctgcttatccgcatcacttgccccaagctgctctgccctgtatatcgctttttgtctggcggtgaaggcaattgtttccccttcctccttgattgactggatataagcctgaagcctttttgtgttttcttcagtggctctcgcatcctcttctgaagctactttgtgcccgttcagcatatcagtagccatctttgtagattctgctgcctgatctgccgaaatggaatattcgccaaccttgccagtcagttcagatagagacttgtttgcatatccatatttctgactaaggtcaacagtcaggtctcgtaattctgctattgtttcaggattggcgttttttctcaccgccgccagagcttcaaccagcttcaaagcatcctcggcgcttatgccaaactcatctgccagactttttaccacctgattaagctggtttagtccgagaatattaccctcatatgtcccgccaagattcttgagtgctgtgtttacatcaattcctcttgctttcagtgtgtcaagctggctgatggcggcggatagtggcgctttccatgagccaagtgcgtcgccaagctcattgacgccctgtactgaagccttgatgatgttgtttgcatcaattagagccattgttaactgtgctcttgcggcgttttctgactgcttagccagtgttgcaaatttgtcagagagaaccacaacaccattagcagaaagctggaatatgtcggcaagacgctgttgtgcggcggtcagtgcctttgtggaaacagctgcgttatccatgccagcaattaatgagccaacgattaccgtaccgatggttagcaatgcaccggcaactgcgcctccagaaccaaagacgcttaataactgactaccttgttgacttaaagcaacgagtgccgattgtccgctctgcacctgaactacaaagtcctgaatctggtagccgccctgtctcatggcgttatttaaactggagaaactcctgccagatttctcagctgtcgatgcggtgttttttagccctgtgtcaagtttatttatcccggcaattgactcatcaattgacttctcaatctcctgaagaaccttgtttaccttttgcccgccagtagtcagcccggatacatccatcccgacttcataaacaattccgccgacttcttcagccattatgtattcctcgcttttttcgctttgcgttcagccagtgccttcatgcgctcacggtctgctttagcctgatcgtactcagccgcacgttcttctttcgttaaccctttcggctctggatatttattcttaatcatcatctgaaactctgtcatggacaggttttcggcctcatctcgcgtcatgtcgaagtgcgtgcgcgctgagatgatgtattgcgacgcatgaaactcgtttgtggttttcttgctctgctcttccagacgctcaggcactttgagtggtgacttaccgatgatgccatgctgcatcaggttgcgcgcaataataataatgtcgttcactggcatgatgccaggcacgtatcgcacgccacgcggagttggcttccatccgccaatcagcacagaaatatcatcttcacagcatgactgcatgacgatataggccgcactcagcacatggcgaccatacactggcttgctgatggttttcatgacttgcatctgcgcaccaaatggcaggcactcgacgtgctgcagcggcgtaacataatcaatgccattgagcttagcgtacacctctacaatttcttttggcgtgccgatggagttcatggcgcggaatgatggcttaaagaaaaaactcctgtcggaaagcgagatgcgcatctctccgatttctgttagtggcgtgcgattgctcatgttttgcatcctgaatttgactgatgttgattatatcatctcagtggtgttgacacctgctaggtggtgatgtagattcaagtcatcgaaacgagtgatgaataaatgaggtgagttatgaaaattaaaacgttgattgcatcagtgctatttgcttcctcctttgcggtaagcgcaacctctgaggtttgcaaaaacatcggagaaatcgccatgaacactgccgatgctcgcgataacggtattagcaagaatcttgccgaggtggtagtaaaaggctcagcaaaaaacaacgaatcagcagaaataatcggccttgctatcgtagaaatggtttatgcacgcaaggatatgactaaagagcaattgcgtgatgtggctgttgctttgtgcgaaaagaatggcatgtaatataaacaagttattaacagttgaggttagttatggacgttgttattttgttgttttttgttggtttggtgatatttgtgtaccttcttccatcttttgtggcattgcaaaggaagcacacaaacacgacagcaatctgtgtgctgaatattcttgtaggatggagctttattggatgggttgcagcacttgtctgggcattagttaacagtggcgataagaaatgaacgagcaaacaaaagctgacctgattttctacactgatttgtatgtcgatgcaggttacgactatgaagaagcggaacgaatggcgaaagacttgcttcgtgtgattggtgtgatttttgatgaggataaggtgatatgaaaaattatgaagacatgagtgattcacaaatagcgcaaaaggttttcttttttgtgagtggtaatctttgccctaacggagggttagctcatatcagttcagatggctttttcttttttgatgaaaagaacattaagagaaagtttgacccatgcaacaacccatatgatgcgtggcctattattgttgaaaaccatatcgcagtcgtaccatatcaatacaccatcccacaggcttggcccacggcatttggcgcggcttcaaagttcaccactgaagacggaaacccactccgcgctgccatgattgtctttctgaaaatgaatgagggtaaattatgagtcagtggattaagtgtagtgagcggatgccggaagaaggcaaaatggttctcacggcgtttcgtggcgtggttagaacagcaatatgcaaaacagccgatgggaatggaagcaagatatttgttagtgaattagaccgctgccacggaattccagatacccattgggccaatccaccgcaaccaccacaagaataaaacaaagcccctttcggggctttttctttgtcaggatacggtgcactccgtgctgataataatttccgggtcagtagatgaatccgtgactgtgacggtatatacaccagcggtagggcttgccagtgtcgcgccagacttaccaccaacaaccgcgccatctttgctccatacataagtgtaaggagcaactccgccttcaacagcaacagttaacgggctgccagtgctgccagttgattgcaggtcggtagtgaatgccagaggctcaaggctttctacggtaacgctgtcagaatcgtaaaccttgaactcaaggctaccagtaacgatgtcgttcgtgccaccttcataactgatgctggtgatgttgcaatacgcggtaacgatagtagcaccagtcacctcgcgcacccacaaggaaggctggcgacgcgctttcagttcagtggcgtaaatctcaaccaggcgatggaagccaaattcatcgctcgggtcattcttgcggatttcaacctctgcgctgatggtcatatcagagctggtaacgagagtggaaacaaatccgccagcggtatccgcttccgacgtagtggtctgcggcgagtagtcaacacctttgctggtggttgaacctaaatacttccagtcttctgcatcaggaactgcgtcaccgcacccctcagcaaggaacagtcgggtcatgcgaccgaccagaacgcctttatcatttgcacaaatagccatttcgatctccgaattgtgttagctgctaacgtggtgattatatcacaggtgttgacagtgattattttgtggtgtagatttggacttaacagagattggctcactgatttcatttaattatagtcaatccttcaattataattagcggtcgagagacgccggacgcgtaaccggcaactatcagtcaagagcatttgcagagttcgattctctgccgggcgtttcgatgcgtgatgtgagtcatgagtgctctttacgatagttttcgtgagcgactttgcaggctttttagaaactgaccacaaagataaatgcaaacgatgatgttgttctgatggcggcgtaatagcctgtaagtcagcaaggtcttccgattccttgtaaacaaattcggcgcactggcccggtgtgattaataatgggcacgcaacaggtaagagcattgggtaatgtcagccttggttcgaagtcgaaagacatgcggtaatacccagcccaagttccagtgctctttccgttgtggtgaagctcaatggcgagctagcagataggcgacagtgaaatactagtcatgtagctgaccgccgcgcgtactgcaatcggcagcgcaccgatggaagcaggttcgattcctgtcgccacaacacttaatatccagcattatcgcaatcatatgtaggggtatgtatgggttacgtggctggatgttaagaaagcacgctggcaatgcttaaaccagcacttatggacgcgtagcttaattggttaaagcaaccgactaataatcggctgattgaaggttcaaatccgtccgtgtccaccaaattaaaagccgcttcatgcggatttatttatttcacaacccgtaaaagcaactcatgcacaggccgtttctcttccgtcagcattggcctaccaagtggtgcctgcaactggatgtagttaacgcatgaatcaatcggatgcgtcttgatgtattcgataatctcattggctttagcgtcaacatcctgaaggttatattgcccttgcttgccgacaacgtacagcgagaaatagaagtcaccacctattccatccataacctgcgtgccgccgtttgattgcaggacaataaattgctcgttgccatctccggtgtcattccagaactgcaactgcgaagtccagccatcatacaatcctgcatcctgaagatatgcatcaaccagttcaagcatattcacagtgtcatctccttcttaataacactatctacaaggtctttcgtgcgttgtgctgctttggtaagaaattgtggctcaccgccaggcgaccagtacgtgccgttgccgttgctgcgcggcttacctgcaagtttgccactggcgttatgaacgtacagggcatatttcgcagagtaaccaaccttaccggtgattcgcgttccgttaacttccaccgtgtcaaactggctgttaatcagcgttgatgtatcaatcggcgtcagcgtggctgattcggtgcgaatgatgtatgtcgctgacttcagagcgcgcacagctttcgtggcgattatctcatccacaatctgcgatgttctttctacggcctgcctgacaccccttaatttcgctggcattatgtcaccagtgcaaaatcaggcggctcacttctttggaaagtgttgccataattaatcacattcagaatctggtttgcgccagccgccagcgggtcaacttctgtcaccgtgccaatcatgatgtaatcaccaaccttagcgccagtgtattctgtccagaaggtatttttctgcacaatctcattgcctttcgcgtctgtcgatacatcatcgttgaaaccataatcgcacatgatgctcactggcgcgtcaaaagttggcttgccgtacttgtccgtaccgcttttgtgccagatggtgcatggctgtgtataggaaaaccgggcaattgaagtcatgatttgtcaggctccactaaaccttttgcacaatcgatcatgaactttcttcgctgcttacgagttttacaccatgcaggaatggtaaatgatggctcttttgttaatttgacgagtcgcttaattaaatcttttgtcatcaacatttgcacttactcccacgcacaaccgcaaaccacggcttaccacttccatcagggtcttccaccaaatcgccagtgcatccggctgtgtccagtagcttcatctgattgtacagcgccacccacggcttactgccatacgcgaatgattgcgatgctccagatggtgcgctctgactggtaacgtaacgccctgcggtgtttgcgctaatcaggattgaagcccacagcatgatcgcattttgtcggcattcatcatttggatagttcagttcaaggcattcactgattgacgccacaaggcacagaatgccagatgcatctgttgtggtaacagtcatcccgcgggatgccatctggcttactaattcttcaggtgttggtgctgccatttctctttgactcccggactttccaccacatctcaaacaggttctttattaccagtgacagtgcgccaagaattgacgctactgccgcccactctgtcaggctgtgtggaatcatagcctcaaaataagattgcgtgacaggtgtttgctctgcgactttcagaccaatgccagtgccaatagaagcatacccagccttatcaatcacctgccccgtcgtcccgcttataacttgctctgcggcctgccttagtgtttcgttcattgcgagtctcgctgatgatatgtttccagcacttatagatttgaatcagcgaaaaaacaatggcgaccacgccaagaataatgtccaatttcgccgccccatttaaaagtgatggaaaggatgaacagatggatgccgataataataaatgcgtactgcgcatgaagcggcgtttctacaggcgtgataaattcccatgcgaatgactctatcgctaccagccattcgtaaaggctcatcgtcagcacgcagagcgccatctttgtacttttgcgcagcgcaatagcaggaaataaccagaccatagactgcgcaaggtaatacagatattcggcgggaaatgaattaacaagcacccatccaagatacacagacatcaccattgccggaatgaacaccagaaacgcgaccatgcccgtgcaggcaaaacccagcacatacatgatcatgatggcaacgtctgcgccgaacattatttcttaccgcgcgatggtgagcgggtggagccgtttggcttcactgcgccagttttgccgccagtttttgtgttgccagtagcgcgtgaacgagacggaccgtttgttgaacccatgtttaaatctcctgttgtttgattagcatgattttagcatattcctgttgacgtagattgatggtgtgtttatagtgatgccgtagaaacaacaataaatgttagaggtgatgagatgaaagatgaattcaaaggtacgaaaggggagtggaagtgcgttaagcgccatgaagtttacactgatgtagttgatgacaatggttttggaatcatcaaggtgattaattctatagcaattttccctgactgggaaaatgctgggtttgaacactggagtgatgaaggcgctcatagggatgtatcacgcattgagcatttgtcaaatgcaaagttagtagccgcagcgccagaattactcgaagcacttcgccagctccgcgattatgttgaggatgtttgtggagtatcttctgatgattgtcatgaagaacacccattaaatctggcgaacaaagcaatcaagaaagcattaggaaaaaaacaatgaaaacactcagcaaaatctattcagacaaagaaacgcgcaacggtatcgctgttaacaaaacctatctcgtgccagttgagcaaatctatctggagccgggatacaacatccgcgaagcagatgagcaacacgttgaatatttcgctcagtgctgggaatcaggccaaccattaccagcattaacagttattcctgatgagaaggggattcgcattcttgatggtcagcaccgctatctcggcgcattgcgtgccattgagcgtggtgcgccaatcgttcgcattgagtgcaaagatttcactggtgatgaggcggacaaaatcgccttcatggtgtcatccagtcagggtaagcagctcgacccgtttgagcgcgcaaaggcttatacgcgactgaaaggctttggatggactaacgaggaaatcgctaagaaggtaggtcgctcagtgtctgacgtgcaaatgcacctgtcgcttggtgatgttccagcggaagtgaaggcacgaatcagtgccgggcaaatcagctatgcaaatgccgtagcggtaactcgcgagcatggcgacgatgcggttaaagttatcgacgaagcggtcgaagaagcgaaggcgcaaggcaaagataaggttacagcaaaggtgctgaagtcgaaaaagattaagccagtagaccgcctgattgaactgctgaagccagcagaccatgtgattcttcctgctggtcatgtggtggctgaggatgaggagtttatccagattcctgttgctgatattcacgaggttatggcaattctggagaagatgtgatgacaccaatagagaaaatatgttgtccacgacatggtggtagcggaacgaaatcaacgtgcccatactgcaaataggttggaaaatgaacgctgaacaattcatcgaaaaacaaccccgctccaaactgccagacatcgaccagatggcaattgatgcggcaattcagtattacaagcgtaatcagagcgcaaagaagggaggcatttttgaggagtgcctgaaggttgcaaaacagcacatgattaaggtgaagtgatgaaactaaaaatcagcaaattattacttgaatcagcattaatatttcaggcgcgcaatgatgttcgttactgcctgaatggaatctgcttcatgactgatggtcgcattgcgtcaactgacggtcatcgcgcatttattggtggcagccatgacaacaagctgacagaaaatgtgattatcaagattggcaagtctcctacaaaacgctatgactacgccatcattgataccaaaacgaaaattgcaacgtatcatgatgaagctggcgtgatggttggtgcaggtgtctgcgaagagattgacgggcgattccctgatattgatcgcgtcattccgaagcagaccttgccaacagaggaaatcggcttcaatgctggctaccttgttgatattgagaaagtggcgaagctgtttaatcctaaattctgtggtgtcaagtttgaactaaatggaaataccaatgccgcagtttgctgccttagcgcgccatctggcgatactgcgaagattgttgttatgccgatgcgtctgtagcaataaaaacccgcattatgcgggttttgtttattctgctttctttctctttgtcgtcttttcttgcggggttgcgacttcgaaagacttttccagttcaggcattacgcgcagctttgacatcagatgttcagctggctcagtgataacctcgccaagctgcaattcacgaatcttacccttttcttttacaaagatgcctcgtgcgatgacttcgtatttagccattattcacctcaattcataaaggggccgaagccccttttttttatcacttcggagtttgcgtaccgtagccgttaaacactttggacttaccggagaaatccttacgcacctgcaaacccatagcagaccacacgaggaagttgaagttatcgtgcgggttggtacgggctgccgcgtaggtggagacaggctgagcaacgcgcggacggatatacatatcattgcgaacgtaaccaacgaaatggttgccagtcagcaggaagttggtgccaatcttgccgatgcgaccgttaccgaactgcgtgatgtactgctcaaccgtgccgcctttgaagccagccgcattagaatacggacgcatgaagctacggcgcactgccggggaaacccacagagtcacctgctcaaatacgttctgcgcatccagaatagcctggaaatcctgattgaagaaggtcacgatttcgtctggcgtcgcggtttgcaggtcgatattcaggccgccggaagcattcaggttaacctgaacagtgttcgggtggttggtgataccatagccagtgtaaacgccgttcacgttcagagtctggtcgccagtcagcaggtactgcgccatatcggaacgcaggttaaaggtgacgttagcctgatcatcaagcagcgggtcaaaaccttcagactgcatacccagcagttcacgccattcgcggctgtagccagtcttgaagattggaatcacatcgccagtgtaatcgtagcgtgttttgtccaaatcttccggctcctgaccagacagagtgcggacgaccttgccagcatcggaagcaatgcggctgattgccacagtcttaccgatattgatgtttgccgcgatacccatcaggtcggccatcatgtcctgaccagcttcgttacggaaaacgcgggtggtgacgttgtccacgtcgcgccagtaatctttcgttaccagtgcggtggcgttaacgccataggttttcgccagttcagcttctgcattgcagaacactttgcggtcgatggtgagatgtttccactggtcagccaccactgcggagttggctaccaagtctttggtaaaaataatcttttccattattatcctccagcaggcatggaagcattgccagcacgacgaactgcaaccagttcagcgccatcagaggcaacagtataagtttcataggagtagaacaggatgttatccccattgccagcaactttcagcgcaccagcaccattacttgccagtggtgtacctttcttcagcgcggaagatgcagcaaccagtgcgtgataagtgacgccaaactcgcactgtacagccatgccagtagcgttagccggaaccgcttcagagacatcaccgccgccgatgtagttatgctgaagcacataagggaagccctgaccgccagcggtagcatgtgcgatgattttgtcatcagtattgaaatcaaccagtgctccaggttgcaatgcggcattcatgatgccttcgcgaatctgcgggtcgtttttgcgggccgggccaccaatgatggtgccataacggatagtagccattattcaggtgcctccatatcaaaatcgtcatcagcgtggttcggctggaagccacccttcagcgcggcaggtttactggtcagcgcataggtttcacgcagtgcttcgcctttcaatgcattcacagcagattccggcagtttcagttcagcgatgatagcagcacgcatcgcggtttcttcctgctcggtattcgcctgcaattgctctttcagcctaacgttttcggcttcgatgtcggtcagcttctggttgacggctgtcaacgattcctgaaccggcttgagggcttcagcgagtaccgcttgcaattcctcgttcgtcattgagatttccccttcagttgattttaccggctcaagttcagttttataaacagccttgacccgctcaccgaccaattttaccacatcatcttcaacgatgtagaactgctgaaaaatctggcctttgatttcgaacccgacgcgatcgttgtacacagccacgatataaggccacacatcctcgcctacttccgccttcagaatctggcgaatctgctcactaatgttctcaaacgacaggtctgatttgttggtgatgtagttgatagccttatgtagccaagatttataattaatcttgttggcgctttcgtctggcacggttgaatcctcaaggtttacggtgattcgttcgatttgctcgccattggtagcaaagatgccaacaccatcttctggcgtcccggctcccggcactcccggtggcaggatggcgagatggtcccactccatgttgcgcgcaatccatgtgtattttttgcctttgcttgttccttccgcagcttcgcggttgagcaataagcccgtggatacgtggattggctcagcgccttctgcggagttcattagcgcctcaatgcgaccgagcagctcctgacctttctctgaacgttcagcgatgactttgtttaccttcaggtcaacaagcaccttaccaccatcatgagaggcattctctatccatgcgccaacatgatactggtttaccgcccgaatattgtgtgctgagacgaaagaaccatcaaccattgggtggttgtatggggctgggtttccatttagcccatgataactattgcgtatctcttccgccgggtacaggccgccgttcatcactatgtcgtcgcatagaggggtgacattttttataacgtagtgcaagtcgccatcaatcacctgctcactgatattgctcgcggaattgatagtggtgagcacgttaacttgcagtctattcatcgcgtagctccacggttagtttgtggtcgaattataacacagggagatatagcaccatgaggcggtagccagtgcaaacaatggcgagtcggtgagtgcgtagagtgtgagaaagtaagtgatagggattatgttcatgggctacctcctgattaaatgatagcagcccatgatgaacaaaagatatacggtgttagtctgaaatcacatcatccatgaatgcgagcgcagcaccagagagacagaacagggcgccatagcaaatcatctggtacagagtatcagcctcaaatactctcgcgaatgcgtaggcggataaaatccacagtaatggaatcatgatctacccccgtggtttttgtggaaccgatgacttaaattggccttctctctggctgctatggcgttagatatatcagagaataggacaagcctgattctcttcttattgatgtaaatatatgccagccacttaccatctcttttcgaccatgacaccccattaaatccacttgtgttgttgctgttgagctttctgttcttgcagttttccagtcttgacacaagcctcagattttcaattctgttatctgttctcacgtgattaatatgatcaacctccatacctttaggtataggaccgttatgcatttcccagataatgcggtgcacgtaatactggcctcccctgcatctaactctcatatatccatcatccttcatatacccagcagcatcaccaattttcattcttcttgccgggcgcaccttccacttcagcgttccgtcgctgtaactaaaaatatcgcaccatttcttcgtcgattcttcgcgcttattcatttcccacctctgaaaccggcctctatttttgccttatttacgtactccataaatctatcaatagacatatccctacgaatcatcttgagaattacaccatgcaataacctttcctcgccgtaatacaatttatcaagtcgagttttaataagtgctcgcgtgcgcttcatatggtcgcgtgctttaagcgctttctcatgccagacgcgatcattcttcttatcagcatattgcagttgacgctcaacagtttctatttcaaacgccagttgcatgtcataatcttcaagctgaatgatgtctgctttcatgatgtcgtttaatgggataatcattttttcacctttaagttgtgttttgttaattcattaatgacatcattttggtcgcacagcagcaaatgcatattgcttaggtcaatctcaattgctgcgcgagatgcttgccatgtttgccagtggccttggacatcatcaatcacatactgaccaccaacattaccactaccagcctcgtggtgattttcagggtaacgaacaaggtctgatgcctcacctccgcgtcgcaaccaacttgcttcaaactgctctctactcgtcatcttcacttcctccactatccagcccatctttctacggttattggcaataaactcatccgatgtcacaaacagggttctgccagatttatgcttaatagcccatctcatttagtacgtcctcagcaagtttgcggaacatgatttgcactcttgccaccttgcgccactcagcctcggtgagaatcacatcctcctgccgcgggattcctgacatttcgcatggcggtagtggctcatactcttgcttcttgcgtttggctttccccatgatgacctcttacattgcgaagcagtgaattgaacaggttgctgacgttaacctcctgctcacgccatgagtaacgccacagcttcttgtggtggtcatagcttcgcgtcacatcaccgttatgaaacataatgcggatgcggcttttcacgattcgataatcaatgccagtggatgaacttatttctttcacctctgcgccagcgttatcaagcaaatggcacttaattgcatcatcaatacctgccgcatcctcagagatgaaatacttgtactgccacttatcaccacaaatcactgacttctcacggcgaataaagccaagtgcaagcatctcatgcaaacgatgcgttgtggtgcttgagttctttcctccgcaatgcttttcaatgtatgcgcgcgttgctcctgggtgattaataatcacgcgcatgatttgtgatttatagtacatagtcacgctcctctgctgcctgactgaaatcttcggctgtgtataggtgcccgttgcgtgtattccatgacttcactgctgattcttgatggagccactcatcagtaccgcacccacactgcgagcaagcaacgtaatagccatgaatgtttttgtcattgtatgcgtcattgctgccacagaatgggcactccagcagtccttcatcattcatcatcggcatatgtggtgctgtcattttgtcatctccttaactaatttcttcatgtttaagtcgcacaatcttcgcagaatcctgtcgcgtcggtaatgtttcttgctgtttttaaacattgctttcaaaaagccaatgctgccataccaattcttttgattcctgcttttcttgtttctggcgttggattccctgatatcagccataactaattggtgtatcgtgctgcatttgctcatttcacccactccccaagattattaaatttaggcgtatcgcccgaccagtcgataacgtccttctgctggctgcgcttacgttgcagtcggttacgcacttctcgcaactcgcactctatccactcacgagtgcgctcaacttcattcagtcgctggattaacgattcttcgtacagttcatctgttgtcattggatgttcctcaaaatttaccagttgttgccattctcagtagctcaggcagtacctcggttgagcaatctacctgaccctgatgatacccttcaaggatggcgtttttgatatgtacaagacacagttcaatgtcttcaatatttactgctcgcgcctcaagcatggagcgcaaatactcacatctttctgttattacttttttcacgctcatttccacatcaccttttccgttgtggtacaatctacgtcaataagtattgactaaatgatgtagattggtcaacaataattttcgagaaggggtagtaaatatgccaagaccacgacgagagccgatggacattatcaccagcattgtggagaagcggcagccgctgacactccgtgatgttcgctactttgcccgttgctatgtggcgctggctgatatgccaaaggaagatatgtatgatttgattcgggctaattttaatgttgacgaaagcaacaaggttacattgagaggcgagtgatggaaagatggacagtaataaacgacagaggtgcaccggtctcttatgttaatggggatggtgatgacaccccgtcaagaatgattgtctttgaagaccggtttgatgcctataaatgggttgttgagaatggcgcatcaactgatgaggtggtgaaaattaaatttgaggtggtgagatgaaatacaaatacctgaaggggagtgctgattattttaatggtcatgaagatgctgttcttgttgtgaaatcagcaaccagtggcaaaatatactacctcagcgcggattatgcggggcgagagaaggatatcgaaaaggctggcgatattgttatcgcccatcgtgagccagtgaatgttacggaggtcggcgcggaaatgtggtttacatccccaacagaagccctcatcaccgaacgcggtagccgatacggcaaattcaaggacggcgctgaaattatgcaggagttgaaaggtgtgatgcgagatgtggatggatggcataacctgacgccaagccaacgcgaggcgctcgacatgattcagcacaagattgggcgcatcctgaatggcgacccgacttatgatgatagctggaaagacattgctggctatgcaacgttaattgttaatgagctgaatggagagattaaataatgtcgctacctaaatatgaagagccagtgtatctccatgttgagcaagttaatggcagaagtatgattgtcgatcaggatggacgcatggttgctggcgtaattgacttccagttcaacatcccttcttttggaaagcctacaatcacagtgacaatcgaaccggcaacacatggcgaaaacggcaaaattcacttcaacacaggagcataaaaatgtcattctgcgatatcaccatcgcgcaacgaaacgcgaactttaccaacattgctgacacgtccgcacagctggtatcactgaatagcgacggcagcgcagtgctgaaaatcggtacggaaaccgcgcaattcatcgtgcagaatctgtcacaggcgaacgcaaagcaggtgctgattagcactggtagcgtgctgtttctggctggcaattacaacgcaccgaatcttgagtgttcgctggtgcgtatcgttgaagctgctgctgaggagcctgttaatgagccaacaacactaccagctgagtgagccaccaaaaccatcggcatggtgtgagcaaatggagcgcaatgcgaaagatggtgatgaggcgtatgcttattttcagctgaagcagatgtggaagcagagagaagagtcggaacacaccagttaaacacaagccccttcacggggcttttttattgcgtagcgaattatactgcgcctcacacgctaatcctgcttctctcgccatgtcagcatagtctgccagttgtcgatttctttcgacagatttgctgagcacgtctccaagcaaaactccggtttctgcggctgggttgccaatggactcagctgtggaatatccgacgagttgcttgcggatgtttgcaagttgttgctgcaacctgccagacttagcggcagcattaacggcatcattgcgcgcagcatcaatcctttgctgggcgtcggcctgaatcttttgcagttctgcattgcgtcgttgctcctctttctcgttggcggccttttgttctgctatggccttcgcatacccgtcgttgtatctctgctcgccgtagctgatgatttcgctacgcgcccacagcgcgccagcggcaacaattataataattgccagtggtcgccagtatttagcgagaatcgacatcatcgcgcagcctccgattttccttcctcatgccgtgcattttgccgaggatgccaaccagcatgattgagtaactcacgcctttaaccacgattggcggtagcgccgctttcaggtcgtccggcatcattacccacacatgcatcattgcgtcaggccacagctgcaacagtgagcagaatgaaatccacaccccgagcagccagttgcttagctttttcatgccacaactccgccagactctttgtatacctgaatcagcttatccagcttctgctcgtactgaccatagccagcgcccggcagtgaggcccagcgggagcggcatttatggatagcatcagcaatgcgaccggcctcaatatccgcagtggccttgcattcacgaattagctgcattgcaatagcatcctgcgatgcgggggagaagtccggtaaacgcaattgctttttgtatgcatcataaaacttagccagtacctgatagcgcccggcagcggtggatttgatgcccagcttaggcaggctaatcagcttgcgagggtgatcggagtagtcagtaaacagtgagccacctacaatcacgtcatagccatgattattggttttctgccgtccgttatccgtgccctcgctgtacgccagcatgtccagaaatgccttcatgtttttgctaatagccataccagtaaacctctttttcagctttgcgttttgctttgtcgccagtcttctcgccccacacgatgaaatgcgcaacagtacatgagaagcagcggagattgtgtttctttagaagcgttgatttgcggaacgcgtcaatgccaatgtcggtggcaatacttgtcagcgcatcaaactgattctgttttgtctcagtggtgatataaggcgatatatctacggcatcggcgattccaagtatctctttgccgcgttgcgatagcttcattctgcctcctgttcaaataatgattaattctatcacaatgaatattgacgtagattgagtggtggtgcatagtatctacatcaaacaaagaggtggtgaacatgagtacacttgaaattattgctcgctcgataattactctatgggttatttcttttgcttttgggttgtgcgcgttctgtacaccgtgggtgtggcaaaggaaaaatcacttcgccataatttacggtccaccttgtgttatgagcatgattgtggcgctgttcttcgttattgttggggtgtggtcatgatggtaatggtcaaattcaaagaaaacggacgctgcggggtgttcaaccttgagcaaatcaaaatccgtccgtgcggcaaagtggttgcgccgtttggtctggtgcagctgcgcgagtgcgaaattattgaatatattaagtgaggttggtgatggaagaatttaaaggcacgcgtggaaaatgggaggttgttgttggtgatgataacactccagatgttatctcggatatcggtgttgatgttgcattcaccccaacatacaacggtgacaaaacagagcaatggcataacgcaaagctgatagcagcatctcctgacctgctgtcagcactccagcaactactggaaatatatgacgaccattcaggcaaagtctggacaacatcaagcaagcgtcgcgctctggataatgcgcgtgcggcggttaataaagcattgggagaaacaaaatgaaacttatcgacctgttagttcaagaattacctaagcgtggcgggtggccaaaacttgtaagcagaattcatcaagaccacgatggtgatgtttatggctggaccggcttatcatctaagctactatttaatattaacattattgctgatgattgcagaccatacggattagatgaatccattgagaatatggtaacccatagtcaatacgaatccgctctcgcagccagcaaggaaccgcttaccggcatggtcgttgacgactggattgagtggggtggcggtgaatgcccggtgaatgccagtgaaatggttgatgttatattagggcgcggtggaataatgtccaccaacattgcaggctgttggcgctggaatcatagcggaactgattctgatatcatcgcctaccgcctgcaccagccgcaggaagtagagcgggcagaagctgatgacgaagccgatctgaatgagagcatcggccaggatgctgcgccggtttggaacggagaaggcgtccctccggttgagtgtgaatgtgaatgccatgttgatgagggtgtaattcattgcattgttgttggttatgattttgacggaaaggctgttgtgatgcgcaacgttccagcccgcaaatacttctccattcaagctaactcagggcgcataaaaccgatgcgcacagaagcggaaaggaagcgagatgctgcgattgaggcgattgactggtttatgcctgaatgtatcccagacacaccaaatgagttatatcatgcaaagaaaatttacgacgccatcgcagcaggcaagattccaggcgttaaactggatgattaaaacaatattcagcgtcgtagagatattgtgctatgcgataataatatttgttctgtgtatgttgataagataaaaccaagccctcacttagagggctttttgttggctgattgccacgcttcacgctgtttatcaagcctttcctgcgacgattcaagaatgactggtttaccatctattagcagtgttggtacttgtgcgcagtggcagttccttcggtttgctccctcgctgtaaaacgtgtcaatctcttccggtgtatagaacttgccatgccgtgacgcatgccaagccctcgttgatttcatcagtgccgactgccacagcattaccgtttcaagacccaactcttcgcgcgcctcaatgacttcccgcctgttagcctgccgcagtgttccggtgatttcagtctgcgcaatctgttttgcgtagctgtgagatacgtcaacgcgcttgatgatgtcagcttcaacatcacgaggattagcaccacgggcaataccttccataatgacagatgccagttgctggcgggaataatcgctcaatccgcgccagtctgagtatccggatgtatacgcaagttgcaggcgattcaggtaaggctcactgtagagtattgcggcaatcggcctttgttcggcataagcagaagacaggcttgacagttcagaattggccttctgcgtcccagcctgatacgcatcaccgatgaacacattggcccacatccttccgtgaccgaaatcatcaccttcaagcagaatctcgtcaatcagcgtctgcaactcatccatgaaagtagcggcacgcgcactacttaaatcatagaaatacagaccacttgattctgcattggcctggctgctcggaatggtgcgaaacaactcaagcgcacgattcctgaattgcttgtatttgcgcgttatcaccttgtccattttcgacaggcgagacgcagcgcctaacgggtcggtcaggctctgcgatatgcgcggctgtggaagtcttgcgttaaaccggagtatcttcattcatgatctcattcataagttctgtagaatatttcaaccactctgttgcaccatcaaagccataaagaccggctgattcatatttgttatgataatacttttcaatcgccgcagcctcttctccggttgtttttatttttgcaatcaaggaaaaatcaaaaggtgttctccttgataatcttgcaattctttgtcttatatcatttgttatgccaacttttattacaccatcacccatgaggaaatatacaaatccttccctcttataatcaaatccgtgctttgcgcatccactgcatcccttgccagcaagatgattgccaggtgacatcatgaataatccgtgttccttacacaatatagcaactttggtgttattgtttttatactccaccattgagtagtcatatgaatcaccatgcagcccctttgaccttgatatgaactctgatttggtcattctgcatctttctgcatttacttcaaacttgcacgatggacaaccaaagccccttaaatgactacttggtgattgataaaaatcaccatgctttctgcatgttatgcacaccttcaaatgacattgcttatactcggttttttcataggtgtacttgttggaatgtatcgcacttgccttcaagacaaattctgaggttgttgtctttctcttatcccaccctgagatatctgcacgcctcttacatccctttccttgcaggtggtcgcttggtgattgcgtgaagtcgccatgctctttgcatgttatgacgatttttgtttttgcgttgacgtattcacatttatcataaatgtacttgtcaccatgcttttgtctggcgcgagagatgaattcttccgtggtgagtcttttagccatgattaaccccgtagtaggttcgtagattgaggatgcagcagggtgtctacgttcaccttttcgtctggccggactagctgcatttatgattatatcactcctgagtgtctgcatcatctttttgtgatgatgcatctggatcatcctccatatatccatcaggcatttctataggctcaagcccaaggaatcccctgatttcatcatctgtaaggatttgaccgacaccagcatttgccgcgctttgtgcagcctgagcgagtttaacaatcaattcagccttatcgttctgcgttggttcaagcagatcattccacttgcaataatacccagcaactggagctttatccacaatgccaaacgtgattaaacgttcaacgaaagagccaaccagataatcaagccagccatccctgcgttgcatagccatcatcgccagtgactgctcatcattggtcgatgcaagaacgccgctgcgacttccaagcaatgagttgagcgggatattcactgaagccgcgaactggctggcagcaacatacataaatggttcagggtcgctcattgatgttgacaggacgctaacatcactcccaaagctgaacattgccgcatcaatgcctgagttgagcatttcaatgttttcgttcagcaggtctgccaaatcatccactggaacttgcatttgctgcgccagtgattgcgctgaaacattatctttattgaacgaaacattaagttggcgagatgagtttttaagcaagccctcagcagagctgccggaaaccttagcgcaatctattaatgagttaaaaccagcgcgtagcaatggaacgccactgaacatgctgccgtcaaaactaccctcagccagaatgataatgcggtcaggatgaatctgcacggaacgctcaggcttgccgtcgctgtcgaagtcctccacggcgctttcctgatattcgtacatctcaggcattccgtagtcttcgctggcttcattgttattccacgcactgacgcgtagttgctcttcccacaccggaataaagcgaacgatggatttatctttaatgcggcgggttttggtaatgtctacaggctcactccacttcttaccatcacggatttgcagtattagcgcagagtatcggttaatcagattccgcttatctgcatccttgatgaatggaagtgcctttttcagaatgtcattgacactcttttcccacggggaagtggcttcatcatcagcgccatcctcaagcactgtaggcataccatgccacgacttgttaagaacgatatttactgcggcatttgccagtgggtaacgctcataagcaaaccggaaatcctcagcgttaatttcctgcttgtacccgcattccgtccagagacgatcgtgcttctggtcgagattcttcccgccagcacaaagccgctgttgctgaagcgccctgttattgttcgccacgcggtcgcgtatataggcgtttaatgcattaattttggacatatgtcaccaataaaaaatcccatcacgttggatgggattatagcatggatggtatatggctaaaccttatacgggtatcgctttctgaacttgccaagtccgcaaaccacattgtatggcataccgtaattaaaatgaacctgatagccacctccagcgccaacgacattaacaacggttaccacttcgtctctgtggtttttatacttggcaccaaccatctcgctccttatggtatttagtgatttgaaatgcatcactccaccttttcgaacttatcaaaaataacagaaagattaaaagcgccactttcagtgattgactggatttccttcacctgcgctctcatggcatcctcatatgcattaactgcatctggtccaatagataatccacagaagctacctacgctcgctacgcttccttgtcgctcgatgtgtccgcagtaaaaataaacgctcatcactcaatctcattatcagattcggcctcaaatttcattggccttaaagatgctaactcagacttatcattgtcgatgaactgcctcaggctgtagttattctgcatgttcatccatgactccggagtcctaccaaccacgatggaaaggcgcatagccataccagcagtcaagtccatcttcttacttgtaatcctgctgatggttgacggggatacacctagattcctcgccatttctgcgcaagttatgccaaatggcttcataaatacctccagcagaaactaacctgggtgcattgggttttttatgctcatcactcaatctcctcaccattaacccagcgttgcaggacttggataagctgcgcggcttgttttttatcaagctgaacccagtcgtcgcattgccttaaatttattactagttctgtatttatatacagactgtggcattcatttgttttttcgataaccatcaaatcaccctctcaaaaaatcattcttgcagcagatacccttgtatccgcgcttctcttgcaggttaacgaagacatcatccagaacgcgcagcaggaagtcctcgtcgatatcataccgacggcaaatcacatcatcaggcacaccagcccgcgccagtgaataaacctgttctttttcctcctgtgtaaatcctgcatagctgcgcatagtgatatctcctttaagcctgatgtagattatactatgcgctcggtgtagattggtcaagtgtggtggcgcagatttataaacattaataataaatgttgacatagatatgatgctggtgtagattgaactcatgaaacgaaaggagtgaaatatgaaagatgttaagtttaacgcaaagaaaaataaatttggtcgcatcctgttttatgttatggaggacaacaagcatctttatgagttcaacaaaatagaggatgcagcggaatggattgctgaacttggtcgccgagcgttgattaaatgaaacaaagccctcgattgagggctttgtttttatcgcctgcgccggattaacatcccgctaccgcgctgaacgatgtggtcaccaaggccatagcgcaaactgtcaatcgcgtgattgtatttatcaactatgtctgggagtatgttccctgttaatttatccaccttgtagctgtacattgtcatctcttcaatgacgttcttgcatcttgagtgtacgtaaatcctgtcacacccacgcagccacgtaataccgtcctcaatgctccccggccattttgcgcacggatgaatgtcgaatccagatcggcgtatatggcttattgtttcaggccttgcgcaatccccataccatctgtacttctctgaatttggaaatgctgatctcatcgcttccggcgtgtcagttatctcaaggccaacctttgcaaagtcacgatagatatacaggtttctgcgtccatcgcccaaatcttctacatatgattctgttgctgcggttgcatcctgagaaaaaccaaagtcaatgccataatatggccctccccattcgggagatggctcgaagtccagcgtttgccatttcccgccaagcacggcctcttcggaacgcttgttgaataacccttcatacacccacagatagcgatcataatccactgccttcatctggttcatgtgctgtttaagttcttcagtgaaccacgggttgtggacgtagttaacattaacaacaacaatgtcatcatcctgatatatgccatcgaccatcttgtcgatgtaaggctcaacaaagttagtccacgttgggtcagtctctttattcgggttaaaaacaataataatttcagagccagccgcacggactgtcgggattaatgtatcccatgacacctgactgatattttctgattcttcacagaatacatctgtaagaccagccatacctttgatggcggttatgtttcgccacaggccgcgaaaaacaaactttgacctcgttgaatggtgcgttatctcaccatcaacgcaacggtattcctgagtgtggcccttcctgtttatctcatcgaccagctctgcatagcttgattctttgattgagttctgtatctcacgaaaacaaccaacgcgactgttgcggaaccttgccttttcgataaggtaggatatacacgttcggctcttggaactgcccctaccaccataaaacaccttaaagcgccgcgggtaaaggataagctccatccgctcaggaattaatattgttggctcttcatcagtttcagatacaccagtggctgtcatcttaaggcgctttacgacattgggagaaccatcctgaagtaacttatctacaagcccaaaaactgctgattcaggctttgcagttgagttgccaactacctgttcaagtttttcgattgccacacttgagagtctttttctagccatgattacaaaactccccgtgatgtttctctctgaactccgccacagctctctcagcatcttcttgtgatgaaaacctacctaccgtatattttttcccaaaaaccctgcaatgcgccttccatttatttttctctgcatcccaactcacaccttttactcctgacgtatttgtcgatggtttaccaacattccatccgttttcattattacttgcttctctcaggttgcagattctgttatctgtcttcacgttattgatatgatctattttcccattgggccacacaccataaatgtaaagccacgcaagccgatgagctttgtgtaaagacttatcgatgcgtatatctatatagcctgacttattcttactgccagctgaattaccaactcttacgctttttgaggcgcgctgaacccatgtgaaaacaccagtatctggattgtaatgcagtagatgcttaagtctttcctgagtgagagcgagctcttttaatgatggcattcttgaatcctcggttacaggcggtctattgattggatgcggcagcccggagaccaatccgggcagggagctaccctttgccgcattaattattataaatcagttactgttgttgctccagcagtttctccagtcgctcaaggcgagcagcgagttcggtaacttcggcaatatcaagaccagcctttataacctcggcaaaagtcttgccaatgtccacaggtataacgccagcagctatgccacgaataacagcatcaatcttctctaccggagttccgtcatcagggaaatcaacttcaaaaacaggggcgacaggcttaggtaacggactgaatcgaacgataagttctttcatcattgcggtgtcacgttcaatcatcgccatctcaacgatggtgtcatagagtttttcctcgctaaaccccttcctttcaagagcttcaacgagcaacttacgcttgtcttttccgcgtttattttgtggttgattttctttactgaatagctttttagccatagataaaacctatcaatattccgctatttttccgttattcgatattgtaacagattctacaccatagggttaatggcaaaaaaagaacccgcacaaggagggttaaaggttgggtgatgatatgagtgaaagcaatggtggttattagcttattgtacaccatcattaccacgcttgccagcatagcaccacgcattttctgttcgcgtatgcacatgaacgatttcaagcgcatccgggaatgtctttgctaccttcgcgatgaaatcgtccagctggtgctgtttggcgatgtgccagaccttttgcttagttgtttgcatgctcaaaacccctcgtagagcacatacacttaatatcgtgaacaccattatcaggaacaacctcaatgtaattacctatctgcaccatcatgtagtggcacgtcttcatgctgttccagtagcgttcccacatgttttgcattgcgtcactgatatcgttaaacataatgcaccactcccgcaatagctgctaccagtgccagcacataaacagcaaggaagattttagcgccagtggtgtatcggcgtcgttggtttctggtcatccatacatctccactaaaacgtgcgcacatagagcgcactgataattaatatgaacgggtagctattcacttttagccaggctttcgaattgctgtgctgtggtgtcaaactgaaccagactgacaacatcgtcgaacatgacaaacccgccatcagggtcttcactcatgtcagcgccacaatcctgaccacacgagtcgcaaccaccagtattaagatcgtatcgcgtgagttttgcgatatttgataaattcagcgccagtacagccaggtcataaacctcttcggcggtataacctgcgccatgaccatacatttcaatgcgggatatgatttcttctactcgttgttttgtgattgtcatttttgctcaccttcatgttcttccagaaaaatacgcatagcatcaagcatctcttccaacttgtcacgcatgatgtgttcaatgctgttaatgaacctgcggattgctttgttttcgatttcagccagggaagcatcggtggctggcgtttcaggtgcgcgcataattgctaccaccattgcgtcatgcatgcagtcaatgtcgcaacaaccaacagcttcagcagttttgaactcacgatacatattgctgaacgcatctgttttgcaccatgcgtttatgtccttaaatgctgcattctccgctgccagcgcagcgcacttaacttccagggtcgcgtagtcttcgtagtcaacataatcaccacatggcgattcgtaagactcaacgccaccaagtgaaactctcatgtcataacgcttaacttcactcataccctaacccccataatttcttcgtaataaccatctgattgtcttgctggcatacattttgttttgcacaaataagaactcatatgtttttacttttccatctcaaacaccatcggctctgcgattccagtcggagattgcctgttctgcagactccctgaagtttgtcattctcgccccgcatgagcatcgaatgagaaagtatggtttttcatggtcagatgagcgccatggcttaacctttggttcaccaccacaaaacgggcatttctttataatcaactcactcatatcatcaccatatacatagctgaatcgtttacaattcaataaaacacatcaaagctgatagtttgcctgcccagatatgattaactcgtccagcacgcatctatctccatctctgtgccatacgcgacacaccttagagcatcttggagagctcactgctcgctcaacctgcttgctcataaagttttgcgcgccaacgtgaccgagttcctgttccagcttttcgcgtcgatagatagtctttgccatttgttacgcctcgcatgaattaatgattgccttaatgcgtctacgataccactgcattatgtgctcgttatgccagttgctcattttgttactccttataccctgattttgaaacttccactgcgataatgatgaatgccacgataaccagacttgctgcaagttcgaatgatgcgcctgtcatttacctaacccatacgccgagattaaagcctgcattgctgcgttccagaatgcttctgcaggaatgctgttgtttgtgcgctcaactgcgatacgtgccatagcctgtgcatcttcaaattcttcacggtcttttattttcatatcttcaccctcgtttgtttcgatgagtccaatctacatcaacgatgattctacgtcaatacaatgactaaaacaaaccaaactgttagtgataaccaacagttattaattttgtaagtaattgatttttaacaggtgcatttatccgttttatcccgctgattttttcatttaccccaaaaaactcgtcataaatcatgatgttgcgtagttttatcccatttacacttatcccgaatctaatagagagaaatataatttttggaatggatttttggtgacaaaaacatggtgagaaaaatggtataaatcggataaatagcagtatatataaatagtaatagtaataaatacatatacttagcactaaaattacttatcccaaactttccccgttcttatcccgttttatcccgaattacatttagcggataagtgatttgcgcatgttgcggcttggttgacatgggtaatggataagaataagatacctgatgtataagcgtgaggaggttttaatgaaggtaacaatggcaactcaatttgatatggataatgcaagaaagagaacaaagtggccttttagtaggatgaagcaaggagaaattgtttgtatatcagaatgtgaatacagcaatacaaaggttcagagaaaagcccatgcttatgggcatgcaacaggaaaatcattcacatgcaaatcaagtgatgggaaagtaatcatcaaaaggatctcatgatgtcgataaaaaccatttatgacctgacggcagacataaacaaagaaaagtggtacgacattaccaaaccacctggtcttgctggtgaaattgctgatgacattgccgctggtgaggttcgtgaacaaccaagacttagagctgttgccgctcttcatgaactgattattgccagcaagggtaagattaaaacaccaagcggtatgaagggaaatcttcttactatctgtatcgcagattcagcggggggaaaggataggtcacaaagccatttcaaaatcatggcgagagatatcgaaaagggtatgcatgtatttggtcgcattgcatcatcaaaagatatcggtcggtcactgataaatcatgatggcgtagcgacatttattattgatgaatgtcatggattgtttggtgtaatgactcagaagaatggcgcagcttacatggctgaacttggttctgaaattctgtctgtttattccgacagactgaagaagttctccgaccttgatgctgttaacgccaaagagcagcttgagaaggaactcaagaagctgaaggctgaagttaaggataaagggattgtagagtcagaataccgcaggcgcgagcagcagcttgagcgtgaaatattgtggccaattcagcagggtatcgaagacccgatattctcaatgatgtgcttttcaacaccagagaagctgtccagtattatttgttcagaaaatatcggaacaggcttgattggtcgagcaatcttcattaaagggaaagatggtcgcgcaaggaaattacgaaaatatggccataaaacaccacaatctctaatagataaaatgaaggcagtggaaaaatcatcaccacaggttgcaagatacgaaaacgatgttgtgcaggcgctggctgaatcacttgatgacagatttgaggagctggtaaatgatgtttctcttggcgc

SEQ ID NO: 18 - protein, 684 aa, unidentified
  REGION 1..684: note = the amino acid sequence of a tailfiber protein of a bacteriophage
MSSGCGDVMSLNDLQIAKKHQIFEAEVITGKQGGVAGGADIDYATNPVTGQTQKTLPAVLRGAGFSPASFNFTTGGTLGVNDADKAVLWPKEDGGDGNYYAWRGSLPKVIPAASTPLATGGISDSAWDAFGDITFRAEADKKFKYSVKLSDFTTLQQLADAAVDSVLIDRDYNFSNNETVNFGGKTLTIDCKAKFIGDGALIFTNMGSGSVIEKPFMESATTPWVIYPWTEDGKWITDAQAVAATLKQSKTEGYQPGVNDWVKFPGLEALIPQNVKDQHVASTLDIRECVGIEVRSAGGLMAAYLFRNCHHCKVIDSDTIVGGKEGIITFENLSGEWGIGNYAIGGRVHYGSGSGVQFLRNNGGASHNGGVIGVTSWRAGESGFKTWQGSVGAGTARNYNLQFRDSVALSPVWDGFDLGSDPGMAPEDDRPGDLPVSQYPMHQLPNNHMVDNILVMNSLGVGLGMDGRDGYVSNVTVQDCAGAGVLAYTFNRTFSNITVIDCNYMNFDSDQIIIIGDCIVNGIRAAGIKPQPAKGMVISAPNSTLSGVVGNVPSDRILAGNIIDSALGQTRINGFNSDSVEMSLRVHKLTKTLDSGAIRSTLNGGPGSGSAWTEITAISGSLPDAVSLKINRGDYHAVEIPVAVTVLPDAAVRDNGSISLYLEGDSLKALVKRADGSYTRLTLA

SEQ ID NO: 19 - DNA, 2055 bp, unidentified
  source 1..2055: mol_type = unassigned DNA
  misc_feature 1..2055: note = the nucleotide sequence encoding an amino acid sequence of a tailfiber protein of a bacteriophage
atgtccagcggttgcggtgatgtaatgtcacttaatgatttacagatagccaaaaaacaccagattttcgaagccgaggttatcaccggtaaacaaggcggtgtagccggcggtgcagatatcgactacgccactaacccggtaaccgggcagacgcagaagacgcttcccgcagtcttacgtggtgctggtttctccccggcatcttttaattttacgaccgggggtactctcggcgtaaacgacgcagataaagctgttctttggccgaaagaagatggtggagacggtaactactacgcatggcgtggctccctgccgaaagttatccctgcggcgtcgacacctcttgcgacaggcggcatttcggattccgcttgggacgcgttcggagatattacctttcgcgcggaagcggataagaaatttaaatactccgttaagttgtcagattttaccactttacagcaattagctgatgctgccgtcgacagtgttcttatcgaccgtgactacaacttcagcaataacgagaccgttaacttcggcgggaagaccctgaccatcgattgtaaagcgaagtttattggtgatggggctttgattttcactaatatgggtagtggttctgtaatagaaaagcctttcatggagagcgctacgaccccgtgggttatttacccctggacagaagatgggaagtggattacagatgcacaagctgtcgctgctacacttaaacaatctaagactgaggggtatcaaccgggagttaatgattgggtcaagttccctggtcttgaggcattgataccccagaatgtaaaagaccagcatgtagcgtccacgctggatatccgtgagtgtgtaggtattgaggtcagaagtgctggtggacttatggctgcttacttgttccgcaactgtcatcattgtaaggtgattgattctgacaccatcgttggtggtaaagaaggcatcatcacctttgaaaacttaagtggtgagtggggcatcggcaactatgccataggtggccgtgtgcattatggctcaggtagtggtgtgcagttccttcgaaacaacggaggtgcgtcgcacaatggtggggttattggtgtgacgtcatggcgcgcgggtgagtctgggtttaaaacatggcaaggctctgtaggtgccggtacagctcgcaactataaccttcagttccgtgactcagttgcattatctccagtgtgggacggctttgacttaggctcagacccgggaatggcgccggaagacgatagaccgggagatttacctgtatctcaatatcctatgcatcagctacctaataaccacatggttgataacatccttgttatgaactcattaggtgtaggtttaggcatggatggtcgtgatggttatgtgtcgaatgttaccgtgcaggattgtgcaggcgctggtgtgcttgcttacacattcaaccgtaccttctctaacattacggtgattgactgcaactatatgaactttgattcagaccagataatcatcattggtgactgtattgtaaatggcatccgagccgcaggcattaagcctcagccagccaaaggtatggtcatcagcgcacctaactcgaccctaagtggtgttgtaggtaacgtgccatcagaccgtattcttgctggtaacattattgactctgcgttaggacagacaaggattaatgggtttaatagtgactcggtggaaatgagtttaagagtccacaagcttaccaaaaccttggatagtggtgctattcgctctacgctgaatggtggccccggttctggttccgcttggactgaaattacagctatttctgggtcactaccggatgcggtatcgctaaaaattaaccgcggcgactatcacgcggtagaaataccagtagccgttaccgtgctccccgacgcggccgttagggataatggctccatctcgctatacctagaaggtgatagtcttaaagcattagttaagcgtgcagacgggagctatacgcgattgactttggcgtaa

SEQ ID NO: 20 - DNA, 40784 bp, unidentified
  source 1..40784: mol_type = unassigned DNA
  misc_feature 1..40784: note = the genomic sequence of a bacteriophage
cctcttcgtcgtcttcatcgcgacttggacggcgcttggtcttgtgcggcgtatcgtcgtcatcgtccaggtcgctatcggtcgctacttcaccagcaccgccgaaggcttcaccgtcttcacggaaacgcacacccagcagattaaccagcagcgttttatacgcgtcgtaccaatagatttcaacggaaatgttggcgtagcagcccgcgtaaacctctttgccttcgatgtcgtctccgtcgacggtcaggccacgctcagaaccctggcgttcaccggcagacgtcataataaccgggcgtttctgacttgtagctttaaagtacaggccttcttccagaccttcgattggtttatcgcgctccgccaggtcacggatggcgcatttatctgcgtggttgccgaaaccgtaattcttatccatccacttctcggcagccttagaggacttcataccttctgttagcacttccagtactgtagaatccagctttgaaatctgcgggtcattcttatccagatatgcggtgagctggaatttacctttaaccggttgaccgttagcgtttacagaatcagcagctttctcaaacacattaacccaaccaattctgactcgtttcaggttcagtttaattcccaattttctatcctctttctcagttaatgtttcgcttgggttacactgcccggccagtgatgcttaatataatagtttaataattcagtgtcaacaattaatttgctaaatcgtcatcggttaccggggtatacgccggtcgcttgtcgtcagacgttgcgatggacggccggcctggcttgcgcgttactagtttagacagttccgcccaaagttcagggtcttctttgcctataatcttttcggcctctgtcggattgacaggcacggttttatccaacagataaccattaggatgattagcacggaactgattaactgcttcttcatcgctccagctccggctaccaggacgcccttcgaccagtttaagcccatcaaccacctcgccgcgcatcagcgccgcgtacatggctttctctatgtcggcgatgtgttggtgcatcaacggcagcttgtcccactcggccttgagctggtctagcgatatttcagatgggtcagtcttagcttttaccgtcttagccgggcgaccatcaaaatcagggattaaccgcaaaatatcagcgggggatacgtcgtcccacacgtccatatagtccgcgtcattacagaatttacggatggctttaagggcttcctccgccgattgctgcgtatcgtcctcaaggtctgattcaacctcccgcgacgctacctttcgcttggcgttgcacttctcggagaaccgacaccccgggcattgtacgttacccggacggaagtctgctggtttaagacctttcttaccgcgctggaacgcgtcgatagccttaagcgctcggccctgtgcaaacttgccgaactgctccagcgcttctggtgttgtatcccactcgtcggcaccgcctgcatacggctggaagatgaccagacgcaccgccgtgatgtcatacaggcgcttataggcacgcagcaggccgagcgcatagagcatcatctgcttgttttctttcgccagcaccttacgccgcccggtcttcagatcgccgacgataagcataccgtccggcatgaccgctaccaagtccgcggtgccgaaggtctgtagctggttgccgtttagttcaacgcctggatgcagaacacgtgtcaagttaacgcgcgactccacctctatcagttcggcagcgtcgataataggacggcagtagtcgacgtacttattgacctgcgacacgaagtcatcagtaattaataccgcgcctttctccggcttaaccagcgctttgatagggccttttccttcgttcagtgcgtacacgcctttatacgtgtctgcggtaattttatgctcacccttgatgacgcgggtaaggacagtctcagccagcgagtgcatacacgtgccatttaccgccgcagcaccagaagtatttggaatgtcatactcacaaattaacgaggcggcacagcctaaccatttagcgctgccgctgggggatagcagcgcgtggctatagttggagttttccactttagctttaagtttcaatcgatgcgctccagtttaatcactgtatatttatgccatgagttcttattaaccgattcggtcacttctgcatgtgcagcttctggggattcggaataaataacaccagaaatacggtttccattactagattcagccaaccagaaatagtaactcattgccgaaactcccatgaataaatcaacttcgcaccttctaacgctgcatgcgcgtaccaggctttggtagactcccagatgattgagtccggcgctgcggctgtcttacgcttgacatcggcagccatagtttttggtgtgaacagcgccagcttacgttctgggtagacaccggccagtaaccagtacatcggcttgttgtcgcgggtatcaatcgcacgataaagttcgtatttcatttaacacccaccacaggttgcttatagaaagttataattcggccatttccggacgaatccgtcgcaaaatatttaatatcatcttccggaaatttatatcctattgtaaaatatcgctgcaatcccgcgtgaaacactttatcaccacgttttaatcttgttgctgattgtaatttgctcatagctctaacccttttgagaaaaggccctggttcgccagggcgcggctgttagtcttcgatttcgtagtatttgccgaccagcttggtggcgtctttgtggaacgcctctacatcttcgtcggccagcttgttcacggtgcggactttgtagttctccagcagctcgtcgaatttgtcggcgcattcatcagaatcaccggcagcgatggccttcgcaatggttctaatctcttcgcgcagcttcgctacgtccgggccttttggctcgtctttcggtttggcctggcgcggcttgcgcttcggcttctcttctggctcttcgtcgtcgtcaaggtcgtcttctggctccggtttagcgccaccttttaccgctttggtgtcgataacgtcttcgccttcgactttaatctcaacaggcttagtgatgttgttagccgcggttagggttgccggttgtttcgcggagttcgctgcaatcagttcgtgcgcaacaacgaaacgttcgagtaataccaggaatttgtctaacattttgtatctccgttttaagttatgtttgtctctcgacgatgagaactataatactaagctaatccgttatgcaagcactttagtaaaataattttcagcttgtacggcgccggattactgatgtatattatggcgacaaacaaccaaggagctatgtaatgaagccacaacctaccgagtttagtaaccgccttcgtgaaaccatgcgtgcgaaaggtattatgcaaattgaaatggcgcagcgctgcggcgtgacacaatcggcaatcagtcacctgtgctgcggacgcaacaatattgccgatgtgaacctgctgttcaagatggccgacgtgctggaagttgacccgcgctggctggcggaaggagatgcggaatgaagtctctgcttgatcggctgaaagatgccgaacaaaatgtttatggtgcttttgagttagacgaagacacaatgtgtcaactggttgatttgctttctcagccgcctgtcgcctggacaagccagcgtagtttagacgtgcgctgcaaaattacagcgtttaccgatgaagacagcgcaaaagagcacggcgataaatccgcctggaacgacatagttccgctgtataagttaggttgaaaagaagcccgccaccaattacagtgcgggcttttctcgaagagtgggtcgaaccattacaacaaaacctcagtgtgtgcaacacgagtatagcgccgtgttgctaaaatagtcaaataaaggtattgcaacatggaaaatattctcttctccatcggcaacgatgctaaatcccgtcgcgccaaaaactacgatatgacgtggccggagttcatcgccgagatggtggactatatcgacgagccgagtctgggcgtcgagttctccggcgatgaaaccaaagagcagtacgaccgcaagaagaaacagcagaactacattgccgctgctatggataaggtgcgctctaacgacactgtactcggtcgctctatcctgttcatcgacctggacggcgtaaccacccgtcaggtgcgcaaagtcacacgcacgctggatgaaaaaggctacgcctatttcgcgcacggcaccagctccgaccgccacgcacttaaaggcggcgccgacgtgcgcgcggtgcgcttccttatcccgaccaatcgcccgatggatgcggacgaaatctggcacgttcagcacagcttcctgaactggattggtctggatgagatggaaggcgtggatatgaccgcgtgccagcgcgcccgcatcatgttcgtaccgccgtatggtgctgagtggtgggaaggcaaaggtaagccggtgcgtgtaagccagatgctgaacaacggttatgaaccgccgagcgagtctggcaacacggtctggtctgaagagtccctggcggctgcatcggaaaattcccaggctattgcgggctgggcgttcgagatgggcctggagatgatgtcgtcggggagaggctgggctatacagtgcccgaaccacatgagtcacactggtaacgacggcacggacgggtctacagctatcttgcttccggattcgctccaccctgaagtgcgttttatgtgtcagcatgaccactgtcgcaacctgaacagccaccagcacatgatgcttcagcttgtcggtgtgccgaatagttatttaccagaagcgcataacatttctaagaagcaaatttctgagcttttcccgttcatggatgaggaagaagtagagcgcgttcaccgtaaccaggtagaagcggcggctgatggcctggacgcgcacgtctgccaggacgaagacctgatggatgagccgtgcgcactgttcaccaagcgcgacccgattatcgacggcttgtacaacttcaaatcgacgttcgagctggttggtgagtctaacatcggtaaatcgttctttctgctcggtcagatggcgtgcgcgtccgcgggcattccgtttgcgggtgcgaaggttatcaaatcgcatagcttctatttcgatgccgagggtggcagcacgacactggaccgcaagcaggcgctacagaagacctacggcgacgacctggactggctgcacatcatcgacctgcaatccgaaggatgggatatcaccagcaaggccggccagcgcgccattatccgtcacatccgcacgacagcaggcactgacccggtaggtctggtggcgtttgactccctcaaccagtcggttgcgctgtcagataagccgttcgacgagaactcatcttccgatatggggaccgttgcttctgcgcttaaagctattgccgatgaaacgggtgcgtgtgccggcatcgttcaccacccggccaaatcagaaaaaggcgcccgtcgtatcggtcgcggttctggtgcgctgcacggcgctgttgacttcgtatacttcattgaacaaccagacgagtccgaaccgctgcgcctgaacttctacatggagaaggcccgcggcagcacgaaacaattgccgcgtggcttcttgctggcgaagtgcaagattgaagtcgcacaaggccacgccgacgctatactggcgctgcaatctgaccgtgaagctcctgacttcagttcattcctggaaggacagaccgtcaagccgttggactcacaaccgcgcgacgagacgttagtccttatacccgtagccctggctccgttcgactctaaggccgccgacgctggccgccaggcggtgaagcaaaccagacaggacggaccgatgcttcgcggaaccgagcaggctgtctacgctgcgctggaggagttgcaaaacgaacgcgacgacggcgaagggttcacccccgcagatgtcatcaagatagttggcaagggtggcgaccgctacaagattctaaaggacttagcccgccgtaaaataatctggtacgggcgcgacgaaaacggacggctgcttaacggtgaggatggcactttcgttaaataccgcataccgacagacattaacgatttagaagattcgcagccaacatccgaggaagacgacctcgaaaactaagctctaggggagacgtgggagaatgttggctgtgaatagttattcagaaaaagtgaatagttattcggggggagatttgggggagaaattgccgagggggagaggtcttcccccgtctcccccgcccgccacgcctgggtttgttgccgagggggagaattaagggggctgctccttagaggagagatgggtgggtttcccccaccatcatccctcacgtcgccttattcattatgcgctatgcaacacggcaacaaagatggaggtatcaaccggcagcgcaaagaataatgttggctgctacttgcaatcatagtattagtgtcgtaatatctgtgtacaccaacagaggagatgtgaaaatggctattgatagtaaagagtacgaccgtctgtgcgaattgacagacgaactgcgtgaatctcaacaggcgttgtttgtagccgcaagcactaatgactccatggatgcggcaagacgttttgtgtccgcagagaatgcctgggaggcttttgttaacggtttggctgactctaagtaattgcgcagcgcgtctggttgttcttgtacgaacatcttcgcaactcagacgcgcgtaaagtgagattaatcctatagaagaggtgtgaaaatgttcaagaagggccagctcataaggagcaaactaaccgggcattattttagggtgttaggcgataatcttaagcggcctttggtagaggccgtgcgcagcggagcaatcggaaatataaacccaagccacgttgctttaatcggcaacaactatcaggcaaagccgaaatgttcgcgttaaaagatatcgtcacctggacgcacccacgcagcagtaagacgcacaccggggtaatcgtcagggtttaccatctcaacggcaaagagcgttacgtggtgcaggtgtggcgtcggtgggcggcgcgcccgcgccactacagaccgaatactgcgtggctgaagaaattgcgttgacaccagaataatactcagctaatatgaatatcagttaaccgacggagacagagacaatgactcattaccggtatgtaacgcttgagcaagcattgaacgactttgcgaatgattggatttctgtatgctacgggggtgactattgcgccccggttaaacgggagaccgaataatggctactctcaaagaccaccagcaggctgtggtagaccgaataatggctactctcaaagaccaccagcaggctatggtagacctgctcgcatccggcagcggtattcctgcctcctcgtcacgtcttgcccatgcaatgcacgatgtgctgtccgcaatgcttggcgataagaaggaatcatttgctgaagagatgacgcgtttatgtaacgagcgtatcgaagccaccacacccggcctgaacgacaaggccctggctgccgatgtcgaggtgttccgtcctaagcaagagattaaagagagtctgttgcgcgctaaagaacgtcgcatcaaggggctggatagcacggttaggcagttgcgcgcgagtaatgcgaagctacggaaagataacgaatggctaaaagaccgcctatctacgcgtgaggatgaacccgaacaagcaggctgccgtaagccggatacgcaggttgattgcccgcaagggcgacacgactatgtttaccgtgaggcaataagcgcgcatcgatgcttacattgcggggacgtacagaaatgaccagtgttcttttcatctgggtgcttaacgcaggtcaggtgcacctggaaggcatagagacgttctacaccctcgaggcttgccagacggcagcacgtaacgccgagaatgcacctatggcctttgccgagcgttcagacgtacaggtaagggctttctgtaacacgaaacgactgagtaaggataagtgagaatggttgcacggtataggtttaactatgtgcaggagatgtttgaaactgacgcaggagagcaatattgcgaaactgaacgagatgaatgggttagatacgaggattatgcggaactgaaagagctacttgacgccctggcgtattcagtactgaactatccgttaagcccggacacagaagaactggcaaagggggtgctaggtgtctgacgaagaacgcgccgccgaccgcaaggaacaggatgaattactagatgaatggtacagaaccggagaattcccttatgtccaacaataaatatcaccgtgagattaagccaggcgtattcgtcgacgtatacgacgtcctgaaggcctgggatgtgagaaaccctgcgttgcagcacctgattaagaaagccctggcggtcggacagcgcggacataaagacgctgccgaggacttgcaggacatcgttgatagcgcgttgcgcgcgcgggaactggactcatcgcgtaaacctgagacaagaagatgcgccaatacatacgcattaactgttaagggtaagtgcccttgttgtgggagggtagtgccatgagtctggcaactgacatactgaaacgtgctaactccgacctttcgccaccatctaaatcaatacgggctgactatatgggccctgccatacgcaaaaaggcgaaacgagctgcacctaaaggtccaaggttaaacaggaagaagggtaagactgttaattacgtagctccaaaacatgagcacgttgccggagttgctttcaactcgcgcaataacacatgggacgcttatttttacgacggaataaaaacaatacgcattggcatgtttcatacgcaggctagagctttaattgctcgcaggatttatatgtactggcgtaaatgcggcttcgacaacatacctaacaagccagaaaggagactatacacaatgcgtaactactcagataaatcctaaaaataagtgattctctattgacaatctgttaacctccgtaatgaaactaaccattacggagtcctctcactgatggacgataaacacttctggctagcagtagcagccatttgcggcggtgccgtagcccaaattaagaaaggcgagactatcccactatggcgccgactttgccatctggctgctggcgccgcctgtgccgtgtatgcatcccctgtgattatcagctactatgaactatcaaattctgatggtcagtacctggtgccttttggcgttggtatgttctggttgaagctattcgaagccgcagatgcatccatcggcaacatcaggttaccgtggagtaaataaaatgccagctactttcctgaacaccccactaggtattatctgtctggtggttatggggggagttgccctcatcaatatttacgcccactggattgaagatggtctggtcgggcgcttactttatatggccctggcgctgacttgtaccgtggggttatttcgacatgccagcgcaggggaccctgaacacctcacgccgacaatcttcgtcattttctgcctgcttggtattcgaagcctggcggtgaaatcgatgagatattttaaataccggaggaaatatgcgaaacatctcagataacggcctgcatttcaccgcggcattcgagcaattccgcggcacagcttacaaggcgactaagaacgagaaatactggacaattgggtacggcagctacggcccgcacgtcaaagagggccagaagattaccgaaggtcagggtcttattctgctgaacaaggatatggctgctgccgttaaagctgttgatgctgtggcgcatccgtcactaaaccagtcacaattcgacgcaatggttgacctggtatttaacgtaggtccgggggctatcgccgcgtctacaggcaccggcaaagcgctacgagctggcgacgtcgctactctacgccagaagctaccgcagttcatcaaccagaacggcaaaccgctgcttggcctgcgtcggcgtgcaaccggtcgcctggcgctgttcgacgggatgctgtggcaacaagcggaaaaagttggacgtgcggttaaatagtcatatactttaaatattccacccagccagctttgccccggtacgtgactaccggggctttatcttattcgcaaataatagttgcataatatctatgaccggcctatagtctgattacaccatacaacatgaggtcgaagagaaatgaacaccatagcaatcaccccagaattagaagcgcagtgtaaagcctgggcagaagaaaacgattcggtagagatgcgcaaacgtcaaatgaaatgtgccgccggatatatccgccgagctaatagcgctatgaccgatgatttacgaaaggcatacttagctaaagctttagagattctggagagtaaccaatgaaaatcaccgacaaactagcgttcgaagacgcacaaatcatggctcgcttggccgtttacagcaccggactggtagcgcctgagtctttctggtgggccgcgatgcaggctcttaaagccgcgtataaggggcaatgagtatgggcaattggcaattggcaacttaaagcactcaaacagcgcacagacaacaacgaagccattgccgaagcacacgttgacgccggtgtttatgggcaaggctggctgaaagtcgacgaacacggcaacctgcgccgcattgacccaacgctgattaccattcacgttaacccggagacagaccatgtttgaccaatacgattaccagcactatggaactaccacggcagccccgaagttcaccaagccaaaccagccaccgatgccgagccgcgaagaactgctggcgcgcaatagcttcggctcagtgaacgataataaataccttaacagacttctggagaagaaaaatgactaaccaagaatacgaagaggcgtgtttaacagcagccatggcttacgaccgtttcgaaggcgagcacaagctgaagcagattgacgagcacatagcccaggtagagaagatcctggcatcgcttcaagagatgcgccgtgagattgttaatcagtacaatctgaataagtccggattggtgtttacgcaccacccgatttatccgtgctgctcggcaggaaatcatgatatcgacgaaacaggtcactgtcgtgattgcgcaaagacaatggcggagatattgaatggctactaatgtaactaaagaatccctggccgagaatatctgccgcctggagagttacggagacctgtcactgaacgaggaataccagctcaaggcgtatcgtctgctaatcgacctgatacctgagtgtgaccatgactggtattcaccaatggctggggtagcggctcaatgcatgaaatgcgggaagatggaatgactaacatcatcatggtaacaattatcggcgcgccgctggtcgtcctggcgcttaaagaaatggggtggtggctatgacgagcatcccggaactcattaagcggcacgggtctattgcggcaacctgccgtgagacaggacttagtgaattgaccatcgcaaaataccggttcgacacaggctgcgagaagcacgtaatttataacggtcgtctgatgacgcaccataaaacaagcccggtgctgtacacgcgccgcggcgtaaccaagacggagagggcgaacgggttatgatggggctattagagtcacttggcgatttagtattctgggtgtttttagtggttgccatttggaggtacaacatactatcgtatttacccgagtggttggtcgtcgtattggtcaccgctatgggcgtcagcggaatagccggaatattatcaaatttgttttaacccctcctgcccgccacgtgcgggcttctttttgcctttgtcaatatctagctatataatcccctaagaggtgcgcagggcgcgtctcatgctttatgatggtcataacggcatttgacaggagatttaccccatgaagattggcaaggctaagccgaaaggcgttgccggtgtgacgccagcacgtaaaacaggcgataaggaaaagcccgtcggctacaagttcggccgcccgactaactaccgcccggaatactgccaggctatcgtcgactattttgccgacccggaatcgtgggaaatcaacgaagatttaaagggtagcaagaaggctattccctccggaaaaataccgactgttgccagatggtgtcatcagattggtgtatctacccgagttctggatgactggcagcgccgctaccctgagtttgctgaagcataccagatggcgcgagaacttcagcaatccttcgctatcgagctggccggcgccggcatcggcacaagcctgctgaacctgttcatgcaggaccgccacggctggaaggccgcgcgcgaagaagccgaacatatcaacgagccaatccagaaagtagtcgtggaggtcgtcagtgcagataagcataaaggcgactgagccgcaggctgcgttccttggtatgcactgtaaattcccggccttcgttgccggttttggcacgggtaaatctgaggtgatgtgtaactccgcgctcctggacagtctggaaggtggctcggcttcactgattgctatgtacgagcctacctacgacctggtgcgtcttatcctcgccccgcgtatggaagagaagcttcagcagtggggtgtgcgctaccgctacaacaaatcggataacatcatctacacgtccaaccggcagcttggcgattttgtactgcgtacactggacaacccggcgcgcatcgtcggttatgaatcatttcgggccaaagtcgacgaattggacacgctgaaaatggaacatgcacaagaagcgtggaacaaaataatcgcccgtaaccgtcagaagccggatacgtacgtagctacgtcgccgaagccggttaacacagtgtctatcttcacgactccggaaggctttcgctttgtgcacgacagatgggtcgtcaacaaaaagccgggctacgagatgattcaggcgtcaacgctgtctaatccgttcctgccggaggactatgtagactccctgcgcgccacatacccggcgcagcttatcgacgcgtacatcaacggcgagtttaccaacctgacatccggaaccgtgtactacgcctacaaccggcagcgccacagcagccgtgagattattaacccgggcgaaacgctttacatagggcaggacttcaacgtcgggcagatggcatccacggtatacgtgcagcgcgggtacgtctggcacgcggttgccgaactgaaagagatgtacgacacacctgacgttatacgtgccattagtgaacgctggaagcgcaacgggcatcatattgttatgtacccggacgccagcgggaagaaccgtaagagtaacaacgcgtcgacgtcggatatcgcacagttgcaacaggccggattcgagattcgcgccaggtcaactaacccggcggtgaaagaccgtgtcgctgctgtcaataaagcattggaatctggtatgctaatgattaacgagcaggcatgcccggttacgtcgcgctgtcttgagcagcaggcttacgacaagaacggcgagccaaataagtccagcggcaacgaccaccagaacgatgcgaccggctacccaatcgcctacgaaatgccgattgttaagcctgtaattaacatcccagtatctttcgccctttaactaagagattaagctgatggcaaacgacaacagcgtaagaacaaaacaccgcgagtggcttcaccacttcgagaaatggaagaaggtgcgtaacgctgttgcgggtgaccttataggttacctgcgcaacgtcggactgaacgagcccgataaagcctatggcgaggcgcgccaggccgaatacgagcagggcgctatctgctacaacttcaccaagcgcaccctttccggcatggtgggcagcgttatgcgtaaagacccggaacagattattccgaaggagctggaatacctgctgcgtaactgcgacggttccggtgttggcctatggcaacacgcacaggacacgctgatggagattgactcggttggccgcggcggcctgctggtggatgcgccggagactgctgcggcaacggctgccgaacagaacgaagggttgttaaacccggtcatcgcattctacaccgcggagaacattatcaactggcgcatgaagcgcttcggttcggttaaccgtgtcgtgatgattgtcttgcgtgaagtgtgggaatacttcgaatcggacgacgaattcgtcgttaaatatggcgaacagtatcgcgttcttgacctggatgaaaacgggaagtaccgccagcgtctttataagttcaaggcctccggtggcgacgccgagccagtagagaccatttaccctaacctcggcccacaattagaaggtaaaatcccgttcacgtttatcggtgccagcaacaacgatgctacggtagacgatgcaccgctgctgccgcttgctgagctcaacattggacacttccgcaacagcgcggacaacgaagaatctagttttgttgtaggccaaccaacactgttcatcgctacgggggctaacttcagtcttcagcagttccaggaggccaacccgaacggtattaaatttggcagccgctgcggtcataatcttggcgagggtggtagtgcacagctcatccaggccgaggcgaacaatctggccaagcagaatatgctggacaaagagactcaggctatccagattggcgcgcagcttatttcaccgacgagacagattaccgccgaaagtgcacgcatacagcgaggagctgacacatcagttatggcaaccatcgcgcgcaacgtcagcatggcctacaccgacgcgctgaaatgggttgccgcgatgatggggctgcgcgaaggcatcgagattgagttcaaactgaacatggacttcttcctacagccgttgaccgcacaggaccgcgctgcatgggtcgccgacatcaatgcgggattactaccggcaaccgcctattatgcagcattgcgcaaagcaggcgtgactgactggacagatagcgatattatggacgcaatcgccgaccagccgctgccgaatgcgacgactgtaaccggcgatataccggcgaatgctaaccagccagaccaacagaacagcggtaatgtgaatgaccagaaccgagtttaagatattcatcgtggccgctgttgcggtcactatttatatgtggtggtgtgtatgacattatctggtctagtttatctttatgttatgtaccgaattgccaaaatggttttggtgggtaaatgagcataatcgaaagcttcatcagccaccaggtctggctccagcgtaacgcgtcgcatgaggtgaacgagctagcgccgttcatccagcagatgcgcgacgaggtgcgccggcaggttctcctgttcggtgacgacaaccgcacgcggaagaacctggaaaagctactgcgcgacctggaagacatcctggacggcataaccacggactggcaggacaagctgaccgaagacttgcagacgctggcgggctacgaggcttactggacgacgaagacgcttacagctaacgtcgatgctgagtttgtcacaccggcgcctgaccaggtatggtctgcggttaagtggaatccactggcgcttaatgataagcccgccgacctgtttggtatgatggctgggtggggagacacggaggttaaccgcctagttaccggcgttaagatgggcttcgtgcagggaaaaacaacacgccagattgtgaaggaggtcgtcggagctggaggcctggccgacatttctcagcgtaatgcggcaacagttattcgcaccgcactgaaccacgtatctacccaggcgcgcgaaactacgtacaagaagaacagcgacatcgtagaaaaatacgaatgggtgtcgactcttgacagtcggacctcaacaatctgccgtagtcgtgatggccagaaatacgagattggcaaaggaccattaccaccggcgcatcctaattgccgtagtacgactgcgccggtaatcagttcagatttcgacttcctggacgctggtgctaaacgggctgctcgcggagcagaaggcggtatacaggtagacgcgagcacgacatactacgatttcctgaagcaacagcccgcctggttccaggatgaggccttagggtcggttcgtggtaaaatattccgtaactccggcataagcccggaagagttccgcgtaatttcggttgacggctttggtcgtccgcttacactacaacagatggctgaactcgataagcgagtagccgactacctgaaggggttatgatatgggtttctttaaagttagggatatccctgcacgacgcgttgttcagtattcccgcgtttccggttctgccgaaaaagtggtttatatcgaagacgaatctgtactaggttcacctgttgacgagatgccgtatgctgataagactggtatcgccgttaagtctggcggcgcactgtatgaagtgccttacctggaagacgttggcgacgtgtatttcgcagtgcagccagaagacgcccagctaggctcaaccgagaccacactaacggcaacaccgaaagccggtaaagctccgtacaccatgcagtggtacaaagacgacaagcaagttgttaacgtgcctgatggcggcgagaatctaaaagtaaccgaggccgggaaatactgggccgttgtgacggacgccgcgggggtacaggcagtgtcaaaagctgcggaggttaagccgaaagcagagtagcgaaagggccccgaaaggggccttatttattgaatcttgcaaacttcacaaccgccattaccgcgaacgatgccgcgctcggtaaactcggcaatcttctcgtctatggtgttaccgcggcacattccgcgtgttgagctatcgggtttcatatgtgttgcctgatagttcgcttccatcttttttattcgcgcataatcttccgggtacatcaccttcaggttgtagagctcttttccgctcatgtgcgggcaacatacgcaacttgatttacctggaagatataaccccacttcttctactgcatccgagtcatgctcaccgacgccccagtcgactaatgggaatacctgagtccatttatcttcgggtctccagttatcggcgcgctcgggctcatcggcatttattccgacaatgcgcaggatagaacctgtatgcgatgatagtctgcggcctttaccattgacgccccaggctttccagcaaccaggatgattattgaaatacttgtccgcagtctcagttttaaaacgcatagtgcatgactttataccaaatgccgcccctggcaacgtgttatcccgttccgccgtttcaataacgctcagtggatgaccattcttgtcgaacttatgcagcactacaactttcgaccagttacggtccgcgcaccacttcttcagatgctcaataaatttgtaggtgtgctggtgctctgagcctgtatcggcgaaaacaatctcgtcaggctcgaagccgcgtttgtacatctcggccagcatcattgtggtgtcgtcacccatccccgccatgactacacggaaagtggtagtggcctatgcttcttcgaaatgcggacgttcggtatagagaatcattgttataactccagggttagcggccccttgccgcgctgtggggtaaagataaaccaccacgaagtattacgcaactattattccatgataaaaataaataggaataaattattccaaaagtggattattacaaattattatgataacctcacttcgttctacgaacgccgcaaggcgcccgtagcgaggtgcctccggcacaacgagcattcgggagaccgcgcggaagggtcgaggtctgttacgagtcgcgcagaatcaacggacaccttatccctcaatgacttacggcaacaatgattcttagtgtgttgccgcaaagtaatggtgtggggttcgctttgggctacccccactgttacgaggggttgggagacaacatgaatctgaaagttcatatcataatctgggctgctgtagccgtgctgttcgtcgtgtatggtaaagttcagtaccacaatggctggaacgaaggccgagccgctctagtaacacaacagcgccagcaggcacaggcgaagttagagaaacaagtcacacggcagcaacagaacgacacccgcgccgccgccgcagaacagcagggcgccgcccgcaccgtaactatcacccaggaagtcgttaagtacatcaagaccccaggccgcaatgtctgcactttcgacgaagcgcgcgttaatctgaaacagcacgccgtcgataacgccaaccacatagaaggctacgaccatgaataaattattcctgctgtctgtaataattggggtaactggttgttcgccggagtacacgccgaatacgttgccgtccgtaaaagcttctttgatggccgaaccgtgtaaatttagtgacgcaaaagctgatgcagatgaagacctgacggcggatgtcctgaatatggactgcggacggaaactccggcagcaggtttacgagttgcaggattacatcaggaatattctggaatagttgccttctggcatggaataatttattcttgacagtgtaaagccgggtggcccggctactaacgtccaggggacatactgactatgaatcgttttttacgtttcccgctcatgaacgaagcgggcgaagaagataaactagctggcggcgctaccaccttcacggcagaacaagtgcagcagatgattgccgaagctgttgagaaagaagtggcaggtctgaaggcgaataatgaagcgttgctgaccgagaagaaagaagcggcacgcaaagcgaaggaagccgaagaagcacgccaactggcgcaccaggaagcactgaagtcggctggcaagatggacgagttcgaaaagacgattcgtagccagtatgaacctgtactgaaagagaaagaagagaagtattctgcgctggcaagccgtgtactcggcagcgagcgtaaagcggttctgggtagctttgccggtgatttcattactccggaagcagtagatatcctagcaccgtttgtgaagacagaatttgaaggtgatgacgtagttactaaattcgtcggttcagacggtagcgtgattacgactgacccggagcagttccgcaagtatctgcgtgaacacaaagcattcagccatcttattaaggctaatgcggcttccggtggcggggcttccggtggcaaaggcggcggggccgcaaaaatgtttagtgaaatgaccgaagcggagcgccttgagttgcaccgcactaatcccgccgaatttaaacggcaacttgaagccttgaggaaataataatggctattaccaccattggcaacatcgtaaccggtaacgaacctgtcctgctgtcctatatgacgcaggacccggtagagaaaaccgctttctttgagtccggcattcttacccctactccgtatgcttccgaaattgctcgcggcccgtccaacatcgccaatattcctttctggaaagcgattgatacctctatcgaaccgaactactcgaacgacgtgtatcaggatatcgcaacaccgcgtaacgtgcagaccggcgagatgatggcgcgcgtagcatacctgaacgaaggttttgggcaggctgacctgaccgtcgaactgaccagccagaatccactgcaatcagtggctaaccgcctggataacttctggcagcgccaggcacagcgtcgtctgattgctaccgctctcggcctgtacaacgataacgttgctgcgaccgacgagtaccacacccagaacgatatggttattgatgtgtccgccaccctgggcttcgatgcaggcgcctttatcgacgccacccagactatgggcgacgcgctgatgggctcaactggtgaagtgctcggtgctattgcgatgcacagcttcgtgtacggccaggcacgtaaagccaacctgattgacttcatccgtgactccgaaaataacaccatgttcgctacatatcagggctaccgcgtggttgttgatgatagcatgaccgttgtaggcaccagtaatgaccgcaagtttatcagcatcattttcggcaacggcgcaatcggctacggcgaaggcactccggagaacccactggaatatgagcgtgaagcctcacgcggtaacggcggcggtgttgaaaccctgtggacccgtaaaacctggctgctgcacccgctgggctacagcttcactagcgcggtaatcaccggtaacggctccgaaaccatcgcccgctccgcttcctggcaggacctggcgaacgccgccaactggaatcgcgtcgtagagcgcaaacacgttcctatcgcgttcctggttactggcgtaggtgcgtaacggtagcgtataatcaggaggggctacggcccctcttttcacattcatacaggagaaatgtatggctaccacaggtaaaggtttgcctcgcagtctgaagcacgctagttttagcgttagttggacggaggtcacaggcaagccgacgacttttgcgccagtgcccgcgacactaaccgtcgtaggcggcgttaagaaaactgcggctgtagcagatatcgcagtgcaaactgtgacgggcgcagatgccgccgctgtcgcgacttcggcaaccactgcggttaacgccgtaggtactaagctaaacgcgctgcttgccgctttgcgcacggcgggaattactgccccttaatcaggagcattgaaaaatggttgatgtaatcaaacgtcgcaccactggcgtagacgacgcaaacgacgatggccaggttgagattgttatggagaacatttctccagcatcattctctaccggtcttaacgatactactgccgtaaccgcaccggcggcgctgacactcaccgttgtggccgcaggggggcaggagccatacagctatcagtggtataaaaatggtaacgccatttctggagcaacggcagcgacttacaccaagacgcctaccgtcgccgggactgattccggtacttacaaagttgttgtccaggatggttatggtaatatcatttcagacagcaccgttgtaacggtatcttaattaaacggcccttcggggccgtcatagggaaacatgatggctaatgacaattacgtaatccgcgagaagtataacggtctggtagagattgatggccagctcgtaccgcagcggggaaatgttctaccggaagaactggtagcaactcaaccggataacgaagaagcgcacaataacgggggtggcgctgaacctaaacgccgtcgccgccgcacgttcgaggaatagctgatggctttagtcgtcgaagatggttctatcgttgcgggggctgacagctatcttagcctggaggacgcccgcgccttggcggctaaatacggctacgtgctgccagatgatgatacggaagcggaagccgcattgcgtaatggcgcgatgtacgtcggtttacaagaacctgccatgtgtggtcgtcgtgtgtctgcggcgcagtccttatcgtttcctcgcaccggtatcagcctgtacggtttccctgtagccaataacgtcattccggaccaggttaaactagcacagcttattgctggcgtagagtacggtaacggcgcagatgtgcgcgccagctccgacggacgcgtcacgactatggagcgtgtagaaggcgccgtgacagtacagtatgccaacaacggcagcacaggcgcgacaatcactatcacggcggctatggacgcattaaacccattgctgtgcggctctaacaatggtttctcttttaatgtatatcggggttagtgatggctaaaacgaaaagtgaaatgtttgcgcttatcggggccaatatacctgataacacgtctggcgctatcacaccagaaaagttacgagaggtgacaacgcaactggcagactctatgctgtacgctgcggctggtgtgaaggaagttgaggtcctgcgcgctccgtctacggttgtacaagcgccaacctcggttgacactgcgttacaattaactttcggtggcgtatacccgcagaccgcaactgtagccgcgtggggtgtcgcaccatcagcgctactcgtcatttcacgactggagccagtataatgagtactgctttcagcaagaaaatgcagggtgtagcgacgcgcctgctcggtaaatacggcagcactgttacgttggtttgcgcgggggctaaggtgtgggacgaagacctcggagaatacgtgcaacagcctggtactcagattcctcttacatctgtccccgtaccagttaacgcaggtcttgtcaacggaactactattcaggctggggatatggtagtgaaagcggactatagcgtgctgccgaagatggaagataaggtcgagtttgcaggcgagcaatggtccgttgttggtatcgagaagaaaatcgttaacgacgatatcgtcgcatggttcattcaggtgcgcaaatgagtaagtttacgctggacattcaggcctttgttgcgaaggccaagaagaacccggaaacagtgatgcgcgctgtgtcactgaagctattcagcgcaataattaagtcgagtccggttgacaccgggcgattccgtggtaactggcagacctccggcgctactccggcgacagggctagttgctggtgttgacccaacagggaataaggccgttactaaagcctatacatacattggaaacgcaccaaactggtacgaatttacgctgacaaataacctaccgtacgctgaacgtcttgagtatggctggtctaaacaagctccaaccggtatgcttcgtgttaacatagcaaggttcaacacattgcttaatgaagaagcagcgaaggtgagataatgggttactttgaagacctgacaaaagtattcgatattgcgttgaaagccttcggcagcgcaaataacattgccgttgcgctggagaacatcgacgcgcccacaagcacagctacgccgtatctggcgagttacatgcttctggccgacaccgaacaggcggacttgttctggactgaacagcgtgccggggtttaccagattgatatcaacgtggcctccgctaaaggtagcgcgccaatcaataaaatggcagacttattaaatacggcgttcaaagcaggaagcacgttccagcgtaacgctatttgcgccgaagtgcagtcggttagcctggggccactgattgtagaaaagggatgggccaagcgcccgttgtcaattaatttcattgccttcactgcgaggatataacgatggcactgcaaccatataagggcgcgaacaccgcacagttctacgtgctggaaacaacgccgggcgtcacgcctacttctccgagctggtcgccgctgcgcaacaccggcggtattccggcattaacacgcgactcactagtttctaatgagcttgacggcagccgcgaaacctcatccatccgtacaggcaataaacagatttctggagaatacgctattgaactgagcgcgcaaagccaggatgaattgcttgccggtgcaatgacaagttcctgggttgccggttctaccgtttccggactgtctgtaaccgtcgacgcagacgcgaagaccttcactcgcgatgctggggatttcaccacagccgtagaggttggcgacctggttcgctttcccggtcttacagggggtaacagtaagccgttcatcgtaacagctgtttcggccctggttgttaccggaggtgctattaaccataccctgacagatgagtctgctgttacgtctgacctggttattgccgataagttggaaacagggaacttgtgtaaaacctactctatcctgacatggtttaaaggccgctgcggtggtgcagatagctatcttattacccgcggcgtagagttcaccggtttcactatcgagcaggcagttaacgcaatggttaccgggtcgttcccgttcatcggtctgaatcaggaaatcctgagcgcaccaccagccggctcaacgtttactgttaacttcaacgcgcagccatttgcttctgtggatgtgtctgcttttaacggcaccgcgccgctgaagcttattgacacattcactattaccaacgacaacggcacatctgcacagtttgaactgggtaatgatagcgtggccttcgttgagcgtggtcgcgcagctaacaccttctcgttggctggtaaactgtacgacatgaccctgttgaatttgttcctgaatgagacacagattgaactgacgtctatcctgtcggggccggacggtgcaatgtcatttaccttgaaacgcgccgaattaacatcggcaactccggagattggcggcccggaatcggtaacactgagcatggaaggtcaagctacaggtaatcagatgcagtcttctatcgtgattcagcgtatcgcctacacataagagaaaggccccgaaaggggccttatttacaaagttcaacaaccatctcaatcactccccaaatgcgtaaccgtaagcgaaggatgtctgcgtcatagcgatagcgttaaggccagacgttttgttgctgttgccacgttcgacggcctgcgctgccgccagcgtcatagccacgcccgcatctttggacgacacaccactcagacgcagcttcttaccgtcgatacaggtctgcacctgcgacgcaaccagaccgttgtagccctgaatctgttccggtgtttcgactttgaagcgagcaacggcaacaaactggtctacgaccgcagcgccgatgtcgcgacaagatacagcctcagccgagaagctaagagccattgaagaaccaagcagtacagcaagtaatgttttcatgataaaccccttcgttaatatattatgaaactaatataaacgacgattagtaaaagcgcaacaaaaaggatagaataattttgcggctagggtcattcctgaaaggcagatggttactgcttgccgctttagcccaaccgttaccctcttaaccaaaggatgaatgatggaactgaaagatttcttttttgcggataagcacgcggcgggtacgttgatgcctatcccgctgccgagtggtgaagattccggggagtggcttcgtgtcgttgggccggccagtgatgtcggtgttaaagccggaagggactatcaccgagcatactttgccatcaaggaagaattgtctgaccttgataaaaaatgcaaagataagaatgactggtcacagtataacgccgagtttaactggcgtgccgatgagctaaatgatgcactagctattgccgttgttaccggctggtcgtttgatgaaccatttaataaagatgtatttaaaacgctacttaacgagtacaagggactaggaacattagtagccaagcatttccacgacagccgcaagtctttgatggaaaagtaaaagcgctgtatgatttcgcccgctggagttatgtagaccgtcagaagaaacagaaatttgacgatatcggagcgggccatgaggctttcttagcagctatcggacagattcaaccggcagcgaagaaagagcaggaacatcctgaattaccggcgctatttgtcggggtgtgggataagtacagaaatctaaaattcatacagcgcgacaccggagaatcgctggtattatgtcctcgtgatataattaaatggcaggacttggtcgcgtataaatccgtgaccggggacacgataagtgtgcttgaggcggaacttatcatgggtatagacgctatatttgagggccgggaagatggctgatacagcttcgctaattgcgagggtaaaaacagaaggtgtttcgcaggcggaagaccagcttgacgccttcgctagtgccgctggaaaggccgacacagccgccggtaagctaggagacacaactcaaaagcagacaacaaaactacgcggcttcggtactggtgcgcaacaggtaggctaccaggtacaggatatgattgtacagattcaggggggcacttctgcatttgtggcaatcggtcagcagggcagccagttagccggggcgttcggccctggtggcgcggtaattggtgcaatcatcgcattgtctgccgctgtcggggggacactgtataaagcgcttggcggtgctaaaattagcgcagaagaattacaagcgtcagcgaagactcttgaagacgtcctccagaagaacaaagacggagtgtatgaattatccgacggtttcgttaagctggcgaacgatacgggtactgcatcccaggcgctggccagattctatgaagcccaatcggcaactgtaacacaaacagaaggtgcgaaggaggccatcactgacttggtcgacagtctcgatacatgggccaacggttcggctatcggtgcacaacgctcgttagaattaggtcaacaaacgtcatcgcttacggggtacatcgaagacctgtcagataagtttggtatcactaatcaggaagcggaagcgctagtgccgttgttggcctcggtgcaaaagaatgcatcgccggagaatatcaaggcgttatccgacgagactgctcgtctaaacgataagtatcagggcaccaatagcgaactggttaagttcaacggcgaactgtttaaaaatataggtcagatgcaggatgcagcgtcgaaggccgatgctctttctggttcccaggataaactcggcaacgcagtgaactccaccacgcagcgccttaaagaacagaatgaccagattattaagaacgttcagataggcaaccttgcggataaagaacgttacgcggcacaagctcaagcagacaaagaagccttcgctaaacgcgaaggtgtaactaaagaacagattgccgcgtataacgccgcacgcgatgaggaagcgcgccaggatattcagcgcgtcaaagatatggaagctaaacgagctgctgcggaacagaaagccgcggacacccgcgcatcgcagcaggccaagcgcgccgaaactgaagcgcaacggcaacagaatgccgcacgtaatttcctggacactctacaacgccagaaccaggacgagttagcggccatcgatgcgcaggaacagcagaagctggagaaacttcaggccttccgggataacgagacaatctcacagcagcaatttgaagaggctaaaactcagattgctcttgacgctgacgcaaaacgtaacgaaatactacaacgacagacagaagaacgtattaaaaaacagttctcggctgacgcttatgtcgcacagatgcaagcccttgccgatagtgaatttgcggagctggacagacagtatgaagttaaacttcagaagctaaacgatttccactcacaaggacttatcgctgaagatacataccagcagacgctatcggctatcaacgatgagtatgctttaagtcgtgctaaagctacgggcgacgcttttggtgacatggctggtaacatcggcaccgcattaggcgaagcgtcaacagcatataaagccttcgcaatagcacaggctacgattgcgacgtacacatccgctattgaggcttacaaatccacagcggctatacctgttgtaggccccttcctggcccccgttgccgctgcggctgcggttgccgcggggatggctaacatcggtaaaatacggtcagcgcgtgaacagggaggtagcctggccgccggtcaaatgtccactattgctgaacgcggtaaaccggaagtaatcatgcccgcgagtgcctctcgtgtacgcacagcggaacagatgcgacagattatgggggagagcggcgctaaatccggaggagataatgttaccattgtgaacaacaccaccggaaaaattgattcagcgacaacagaacgtgacgacgaagggcgattacgtattataatcagtgaaaccgtaagttctgcgctacaggatagtaacagcgcaatttctaagtcacgtcgcgctacgcgcggccaaccaggatattgatatgagcgatcaccatttcccggcctctttgaggccgatagtatcgaaaggctactcgatgacacgcggcaacaacgtgtggcgtgtagacctggccggtggtggagttcggcagggacgagacacctattttgacgtgttcccgattaacgttaccctggtcgtatcaccgttggggcggcaagcattcctcagcttcatggaaaaggtagacggtggcgcgtccagtttctggatgaaacacgacttgggtcagggtattgaggattaccaaataacgctgacatcaacgtggaacgagtccaccgatgatggtaaaaactgggtaatcactttcacggccaccgccgagaagtcaccattccaggaagccagcaacgcttgtctgaaccagaacctacccgatttgtacgggtgctatggtgattgcctgggcgaatttcttaaaacatacggagtgtatcagactacattcccccgaatctgggacactatgcaatgagtcaggaatcagtagaagcggcataccgacgtaaactagcgtctaatcccgatggcgagatggactttataactcttgagatataccatccacttctctcgaaacggtggttacttgtgcgcggggctgacgatttaacagctactcttgagaccggggaggtcgtgacgttcgagggtacgccgatggaggctaagaacgccgccaacaataacgatatggaccagaccgcgtccttttcgcttccggatgtgcttaacatactggatgaggaaatggaccgtataccttacgataacaaggaactgcctaaattcatattccgtcgctatgtgagtacggacctatcctatccatgcgatggcccggtggtttatgagttgcaaacactcacacaagaaaaaggcgtattcacagcagaaaccggcacacccatgctaaaccaacgggcgaccggtattttgatgacaccggaggagattcctttacttcgcgggatactgacatcgtgaatattaatgattacactggcttgccgtatgactttcgccgccgtaattgctggcatcacgtccgcaacgttcgcgcggacgcggggttatcgaccccgatgttcgatgtaacaagcccaacggcaatagacgccgccttcgacgatggccactctaatccgaaaggtctggtacgagcggtcacaccgcagaattttgacgcggttctactaggagtgaaacataggggacgaatagtgtggcatgctggggtatattacgaaggaatggttagccactgtgagctggcgtccagacaggttagactggatagtctggaagaccttaaagatacttattcggagattgaattttggcgctagtaatccactatacccgcaacgaagacggcacatttgacgttaaacgttatcgcgataatccgatgaacttcgtcgtgaaccatgttccggacggggtgccggtgcgtgttttcattgacgaaatcggagaagataacgacgtaacagaagacttcgaagcactgaaagaaaacgcgactttccacattgtggaatctgccggtggtggcgctattaaaggcgtcatgaagatttttagcgttatccttaaaccgctagcgaaactattatcaccatccgtgaaaggggcgtcatctaaccttgcgaactcgcaggcggattccccgaacaacagtctcaccgaccgtaacaacaaggcccgcccatacgagcgcagctacgacatctgcggaacggtgcaaactatcccaaataaccttatgtctacttataaggtgtttaacgccgctggtaaaattgtagagtacggctattacgacgccgggcgtggttacctagacatacaccctgaaggtataactgacggggacacccgcgtatcagacataacaggcacgtcggttgccgtgtactcaccatatacatcgcccaataacacatcggcgccccaggtcatggtcggcgaccctatagagcagggcctgtacattaccgtagaatctaacgaagtcgatggcgtggttcttaaagctcccaacggcctgggtatttctttctcttacatgtccgggtacccgtctttgtcagggaacattggcacaatatatgacccaacaggtggttcggatttttctggagtgttggtgcctaatgacacgttttcgttggtgtcagcgtggacaaatacagacgtcgacttgtccgggggtgggtaccaagtgttaagcgtatccgaagggacaattacatttattgtacctggcggccttatcggtcggtggcaagaaataagaccaggttcattttttcgaggtgacggagaggcgtcgctgcaaccggataacacatacgagaaaaccttaaccgattgggtgtcaataaaccgtaccgaggttgagcgcatagttgccaatatcgccgccgccaatggtatgtataaagacaacggcaaatctaaaacactagcgtcggttaccgcggagatacagtaccagctgcttgatgaaaatagcaccccttatgggccgatatacactgcacaaggaaccgtgtccgggcgaaccccagactacaacggtgtcactatttacgccgacctgccggttgtgtcgcgggtgcgggtgcgcgccagaagggtgacagacctcgactttaatttcgaggggtctgtagttgatgagataacgtacgttaacttgtacgggcaaacacgcgataacactccgcactacggcaacagaactactgtacactcgatgcgcaagcagacaccgcgtgccgcggaagtaaagcaaccgcagttgcgcatgattgctactgaaatggtgtacaaatacctcggtaatggtgtttttgaagacacgatgacccccaatacgcaagccgtgcaatctcttatccgcctggcgcgtgatccggatgtggggggtttaaacctgacggtacgcaacatggataagttacttgctgtgcagaacgaggtcgaagcgtattttggcgacaaacaggctggagaattttgttacacgtttgatgactataaaaccaccatgcaggacatagttagtactatagcagacgccatattctgcaccccatatcggcgtggggcggatatccttctcgattttgagcgccctcgcatgggccccgagatggtgttcacccaccgaagcaaggccggtacttctgaaaagtggaccagaacatttaatgattctcaggtttttgacagccttaaattctcgtacatagaccctaagacgaacgtcaaagagactataaccatacccgaaaccgggggccttaaaacggagacttacgactcaaaaggaatccgcaactataagcaggctttctgggcggcaaaccgtcgtcatcagaaaaacatattgaagaaaatttcggtgtcgtttaccgccactgaagagggtatttttgcccttccgaatcgtgccgttagtgtggttaagggttcgcgtatgtctacttacgacggctacgtaaccgcggttaacggtcttaccgtagagctatcccagccggttaagttcacatccggagatgaccattatttggttctgaagttacgtgatggcggagtccaaagtgttcgtgttgtccctggtgcgcatgaccgacaagtaattatgacgtcggtgccgcaagaagccatttacactggtaatagtgctttgaaaactgaattttcattcggcaacgaagcaaggcataatgctcagatgattcttgtttctacggtagaccctggcgatgacagaacagtcaaaataaccgggtttaactatgacaaggatttctataagtttgacaacgtgcctcctttcggtcgtgcgttctctaacggattcgataacggttttaactaagagggtagccatatgtccagcggttgcggtgatgtaatgtcacttaatgatttacagatagccaaaaaacaccagattttcgaagccgaggttatcaccggtaaacaaggcggtgtagccggcggtgcagatatcgactacgccactaacccggtaaccgggcagacgcagaagacgcttcccgcagtcttacgtggtgctggtttctccccggcatcttttaattttacgaccgggggtactctcggcgtaaacgacgcagataaagctgttctttggccgaaagaagatggtggagacggtaactactacgcatggcgtggctccctgccgaaagttatccctgcggcgtcgacacctcttgcgacaggcggcatttcggattccgcttgggacgcgttcggagatattacctttcgcgcggaagcggataagaaatttaaatactccgttaagttgtcagattttaccactttacagcaattagctgatgctgccgtcgacagtgttcttatcgaccgtgactacaacttcagcaataacgagaccgttaacttcggcgggaagaccctgaccatcgattgtaaagcgaagtttattggtgatggggctttgattttcactaatatgggtagtggttctgtaatagaaaagcctttcatggagagcgctacgaccccgtgggttatttacccctggacagaagatgggaagtggattacagatgcacaagctgtcgctgctacacttaaacaatctaagactgaggggtatcaaccgggagttaatgattgggtcaagttccctggtcttgaggcattgataccccagaatgtaaaagaccagcatgtagcgtccacgctggatatccgtgagtgtgtaggtattgaggtcagaagtgctggtggacttatggctgcttacttgttccgcaactgtcatcattgtaaggtgattgattctgacaccatcgttggtggtaaagaaggcatcatcacctttgaaaacttaagtggtgagtggggcatcggcaactatgccataggtggccgtgtgcattatggctcaggtagtggtgtgcagttccttcgaaacaacggaggtgcgtcgcacaatggtggggttattggtgtgacgtcatggcgcgcgggtgagtctgggtttaaaacatggcaaggctctgtaggtgccggtacagctcgcaactataaccttcagttccgtgactcagttgcattatctccagtgtgggacggctttgacttaggctcagacccgggaatggcgccggaagacgatagaccgggagatttacctgtatctcaatatcctatgcatcagctacctaataaccacatggttgataacatccttgttatgaactcattaggtgtaggtttaggcatggatggtcgtgatggttatgtgtcgaatgttaccgtgcaggattgtgcaggcgctggtgtgcttgcttacacattcaaccgtaccttctctaacattacggtgattgactgcaactatatgaactttgattcagaccagataatcatcattggtgactgtattgtaaatggcatccgagccgcaggcattaagcctcagccagccaaaggtatggtcatcagcgcacctaactcgaccctaagtggtgttgtaggtaacgtgccatcagaccgtattcttgctggtaacattattgactctgcgttaggacagacaaggattaatgggtttaatagtgactcggtggaaatgagtttaagagtccacaagcttaccaaaaccttggatagtggtgctattcgctctacgctgaatggtggccccggttctggttccgcttggactgaaattacagctatttctgggtcactaccggatgcggtatcgctaaaaattaaccgcggcgactatcacgcggtagaaataccagtagccgttaccgtgctccccgacgcggccgttagggataatggctccatctcgctatacctagaaggtgatagtcttaaagcattagttaagcgtgcagacgggagctatacgcgattgactttggcgtaaacagtaaaggcccctttcggggcctttttcatattgccagataaagtgcatacgcagtaacaaacccggcaacaacaaggcccacgatgaaacattttgcgccaattgagtatttcatttaattctcctgtatttttgcggccaaaccattacttacttccggttgctcaagtagccagtctaattgcgcgttcgcagcatctcgctgccgccgtagtctggcgttctcggcttcgagttcctttattctatcgtataaatctttccaagatttaccaatgtaagtttccatcacacacctctcttcttgccgtggttttcatggaatccgtatttaacttcggcagctttacgcgcagccactgcgtcttcgaagtttttgtaataccctatatgctttcttttaccgccaaggtagattgccgacaccaatctatttctgcttttgacgtaacaaacgcctattactcctgatgtattggctttacctagtgataggtttttattattattaactcctttcgttactttccttaagttaacaattctgttatcggaccggtcatggtttatgtggtctacttcgaaaccgggtgccagtaaatcgccgggattgcacatatcccaaattatgcggtgaactggtatatgtttttgcctgaattttacccgcgtgtacccatctttctctttacttccggcgcgtccgtcaggcttatggcacttaggcagcacgcgccaatacaaaaacccagtgttggcgtcgtaactaaagacgtcatgccaattcatttagtctccttccttttgcagtattctaatagcaaatcttgaacgtccgctttcccttcaagacgggcttggacaacctggtcgagcgtatcggcagcttgaatctggtacacgaacaccgggcgtgggtggcccgcctgatgctgtcggacaggaccgatacgttcgataacctgcgcatagtgctcatagttccacgtcatcgagtagaaggccaggtgacagccgccgtcctgaagattgaggccgtggccggcggacgcggggtgtaccagcaacataggaatctcaccgcggttccacgcttcaatctgtcggttgcccttctggcctttcgccagcgcaacggcatccgggaacttcttcaggatgcgggctcggtcgtgctgatactggtacgccacaagcaacggcgcaccattcagttcctcgtaaatcgactccagcgcgtccagtttggcattatgcaccggctcccattcacggcttgcttcgccgtcttcacccgtcgtgtatacggcgccgcttgctatctggagacacttctgggtgcgcgctgccgcgttcgccgcttccacctctccggcttcgagctgggcaaatagttccttctccatctggtcatagactttgcgagccttagacggcagcggaaccacgatgggtaccaccacgggcttgtcgcacccaaagtattcggcggcgtccacagtaaggctgatgtcggcaatcttctggtgaatctcggtatcagcgccagggcgaggcttatacgagcgcgctgcgtggtgcgcgccctcttgcacactgataaaccatctatccatatacgcctggtaactactgcctaggcgctgtccggcgtccaggagccagcactggccccacaggtctttcaggccgttaggtgcgggcgtaccggtcaggttaatgaagcgcttaatcttcttatgcgccaccttgccgagcgcccgggcgcgcttactaccgccgcgactgcggaacgacttcagcttggtcgactcatcggcaacaatgaccgtgaacggccagcggtctccccagaattcgacgagccattccaggatgtcgtagttgcagcacacgacgttggcgtcgtcgttcagcatcacgtcttcgcgatactggcggctgccggtgccatcgacgacgcgcagcgcggggaactgccacttaatttgttcggctggccatgtgccggatgcgacgcgcagcggggccagcaccaggacgcggtcgccgctccagttctcctggtcccagtcttccaggatgccggactggaacatcttattcagtgaccacatcgtcgcgcccgtgttgtgcgtcacagtgaaatcacctaacaggaagcggtggtcgccgtcgatagtgaaaccgtagtaatcgtctaccccgaccggctcgatactttttataccgacattcaggacgttcttagcaattttgcgctgggggatgttaagatgacgcccgcgcacaaacggcagccacgaaaaatcaccagacaggcttacacgccagtaatcaccccacgcgccggtatttacacactgcttgcgagttgccgatttatacgccgcgaaaccaaggcttctggctaaataacagatatcatcggctaacacttctttaacgctaatccagtcaaaaccaccgttgcaataatacccatcactgtccagcaaaccagccagtaatttggctcgctgctggcggtcgccacatttgtagttatgcgggatgtgtttgttgttaagcacgcccgcccgctttagagcgtcagtaagtccctgctttttatgcccggtatttccgtaagagatatgccaggttatgccgtctttacggattttcatgccgttgctagcggcgtatgactccagataatctctaatctccttttcgttgttgccggctgttatcgcgccttctgaggtagtaccatcacccagccacaagcccaggaggtacggcggcagcataacgtcgtcttgttctttatggccaaaatcaaccgccgcacgccaacccttaagcagaccattacgaccgcgtagccattctggcagcttaagccagtccttcagtggaatatcaaaaacagtattgtcgggccacgttttatttctggttccggttgtagttcttaacgataaaatgtgactttcgtttaccgtatacgggtcgcctttaactggcgtaacttcgtacatcatctcgcgacctctaccgagtgagagcacgcggcgcggcgttgaatctggccccatcagcaagtcgccgacaactacatcctgcacgtgcttaatcgacccgtcgaacatgataattttagtgttaattttcaaacacttaccgctgcccatcgtcgcaaaaacatttgcccgtgggtgtttcatgatgtgcgcagttattagtttttgataaggtctgcgaataaaattagtcatttgtttctcttctcacgaatccgcgccgcctctgtagcacgacggcagcttttgcagatattccggtagccatcgatactggctacgctggacttatggaacgccgacagcggcagacgctcacggcactggatgcagcgcttacgtggctcgggttcttttggtgttagtcgcatttctcatattcctttttggcgcattgtctgttgcaaaaccaataagggcgtaagcgccagaccgcttcacagcggaagccgaaaggctttatccccttacgcccgcaatgctcacacctgtaagttaatcgcatggaaaaagctccttaaccagcgcgtcaacctgacgcttgctgccgataaccctgacgtcagcgccgaccgcgcgcatccgagcatgttcgcgtagctggtgttcttcgggctgcgtgtcttccgacttcttaacttctacaaagattacacatgactcccggtaaaaagggcatccgtcgcttgattccgacgaatgtataaagtattgaggtgccagaaccaaaaggtctggacaaccgcggcgcatctcatatcctatcttgcgaatcagacaaccgcgggccttaagctgttttttaatgtattcaacaatctcaccttcgggcgtttttgccatgttggctgtctccagatgtgtttaagcgatgactcaaagataagccatcgctaagtattagtcaaatattatttggcgtagcgcatcagttccgcaccttcagctaccaaagggaaacccttagcccacgacggcaactcacacatcatggcttcgagcttagaaacagaatattctgccgtatctggcgtttcacacaccacttcgtcatggatatggagtatgatattccaatttggttctttatccacgcgaaccaacgcataggccaacaggtctcggcagaatgcctggcaaaggttttcgcacaacttaccagaatacgtgtattgcttcccccattgtcgcgtcgtctgattcacacccatatagcgaatacgctctttataggtcgtcttgctctcttcatagtcatcgtcctgaacctgcttctcaacagatataccaatacccggataagagagaatgcggcccgatggcatttccagtttaagccaccaaccaggctcaccttttttcgttttggtgcgggttatcttaatagccttatttccatccagccgaacttcgtcaccggcccaataaggaaccccggggttttttatcgccatcatcgcaccatcttcaagctccctccagaatcggattgttgccgggtgtgactctctccacatacgtttaatggcgtcacaggtaagccagacgttttttggcagatcatacgaagggcggtccgctttctggcctgcaaacccttttttattcttctcctgaattcgcgcgtattcatacccttttttagcaccggcccagatatgctccgggaaagaaccggccataaggtcggccattccgtgaagatccagaccagtgactttagccatgttgacgaacgcaccgacgccccccgagtacccgagtgccaattcgcatgttttacctatctgcctcaaatccttacggtttttcttaatatagtccggctccaggccaaacatcttacccgcggtaacgcagtaaatatcgaggccagaccggaatgtttcgagcgccgcttcttcacccgctagccacgccaaaccgcgcccttcaacgttggaatagtcggcgacaacaagcttattgcccggctccgggatgatacaactacgaacggtagaggcggtcagcttactgatgtcatacagccagtgggcacggctcttgagcaataagtcaatcccgaggtccaattcctcccctgcaaaataaccacgtgctaagttctgcggctgaaagccttttcctgcgaaacgtaaagtcctggatgccccgccgtactgaatacaaccacgccggcgaccgtcggcggacagaccaagcaggagcgggttgtacttggtcgatgccgtggagctggcccccagacgcatttcgataagtgtacgagcgtcgtcaggcaggtcatcgtcagccagcaagtcgtttagcgtggacttctgcgcgttgagaatctcatgacctggtgcgaggtctcgcagcgtaggcagaaaatcagcaccggtaagacccgcgccccatttggcgtttgcttcagcctgtagttcaatcttgtgctgcttcaccgcgtcgattgccgcgttagccagcgccgtgtcgacgtagaagccgcggtcgttgatgcgctggtcgacagccaggactgtgttctcgaactcggtgttgccccactgcggcagcgagtgataaacctcgcgcatagatgtgatatccgagatgccatattttatgaacgctttccactcttccggatgcgttgttcggtcgtagcggcgaatcttatagttcttcggtgtcggcttcgagaagcggttaatcagcgctttaccgctcttgtctttcgccagatcttcgtctatttgcagaacttcacacagtccggccaggctgccgggtagtgagtgacggaaggcgcagaccatcgtgtcaattatatcgcgcgggtcaagttctatcccccatacgtttttaataaccagtctgtcgaacatgagaaagttttgaccaactatcttagccttgtgtcgctgcacctgtcgtaaggcccgtttaaggtcatctggcatcttgtcatctgccgtgcagtcccaacaatgtacttcgccgtcgtctatggcgtaaatagccagcaggatttcggttgaaggatgttccgcatacgcgtatgagccaacctttttcaggtcagcttcggagaatgtttcgaggtcgagataaagtagttccattattttgctccactgaaagaaaagcccgcatcagcgggccttgtcgttatcaaatgtccttattcttcgtcgtcttcatag

SEQ ID NO: 21 - protein, 667 aa, unidentified
  REGION 1..667: note = the amino acid sequence of a tailspike protein of a bacteriophage
MTDITANVVVSNPRPIFTESRSFKAVANGKIYIGQIDTDPVNPANQIPVYIENEDGSHVQIAQPLIINAAGKIVYNGQLVKIVTVQGHSMAIYDANGSQVDYIANVLKYDPDQYSIEADKKFKYSVKLSDYPTLQDAASAAVDGLLIDVDYHFYNGEKVDFGGKVLTIECKAKFIGDGNLIFTKLGKGSRIAGVFMESTTTPWVIKPWTDDNQWLTDAAAVVATLKQSKTDGYQPTVSDYVKFPGIETLLPPNAKGQNITSTLEIRECIGVEVHRASGLMAGFLFRGCHFCKMVDANNPSGGKDGIITFENLSGDWGKGNYVIGGRTSYGSVSSAQFLRNNGGFERDGGVIGFTSYRAGESGVKTWQGTVGSTTSRNYNLQFRDSVVIYPVWDGFDLGADTDMNPELDRPGDYPITQYPLHQLPLNHLIDNLLVRGALGVGFGMDGKGMYVSNITVEDCAGSGAYLLTHESVFTNIAIIDTNTKDFQANQIYISGACRVNGLRLIGIRSTDGQGLTIDAPNSTVSGITGMVDPSRINVANLAEEGLGNIRANSFGYDSAAIKLRIHKLSKTLDSGALYSHINGGPGSGSAWTQLTAISGSTPDAVSLKVNHKDCRGAEIPFVPDIASDDFIKDSSCFLPYWENNSTSLKALVKKPNGELVRLTLATL

SEQ ID NO: 22 - DNA, 2004 bp, unidentified
  source 1..2004: mol_type = unassigned DNA
  misc_feature 1..2004: note = the nucleotide sequence encoding an amino acid sequence of a tailspike protein of a bacteriophage
atgacagatatcactgccaacgtagttgtttctaaccctcgtccaatctttactgaatcccgttcgtttaaagctgttgctaatgggaaaatttacattggtcagattgataccgatccggttaatcctgccaatcagatacccgtatacattgaaaatgaggatggctctcacgtccagattgctcagccgctaattatcaacgcagccggtaaaatcgtatacaacggccaactggtgaaaattgtcaccgttcagggtcatagcatggctatctatgatgccaatggttctcaggtcgactatattgctaacgtattgaagtacgatccagatcaatattcaatagaagctgataaaaaatttaagtattcagtaaaattatcagattatccaacattgcaggatgcagcatctgctgcggttgatggccttcttatcgatgttgattatcatttttataatggagagaaagttgattttggtggtaaggttctgactatagaatgtaaagctaagtttataggagatggaaatcttatttttacgaaattaggcaaaggttcccgcattgccggggtttttatggaaagcactacaacaccatgggttatcaagccttggacggatgacaatcagtggctaacggatgccgcagcggtcgttgccactttaaaacaatcgaaaaccgatgggtatcagccaaccgtaagcgattacgttaaattcccaggaatagaaacgttactcccacctaatgcaaaagggcaaaatataacgtctacgttagaaattagagaatgtataggggtcgaagttcatcgggctagcggtctaatggctggttttttgtttagagggtgtcacttctgcaagatggtagacgccaataatccaagcggaggtaaagatggcattataaccttcgaaaaccttagcggcgattggggtaagggtaactatgtcattggcggacgaaccagctatggatcagtaagtagcgcccaatttttacgtaataatggtggctttgaacgtgatggtggagttattgggtttacttcatatcgcgctggggagagtggtgttaaaacttggcaaggtactgtgggctcgacaacctctcgcaactataatctgcaattccgcgactcggtcgttatttaccccgtatgggacggattcgatttaggtgctgacactgacatgaatccggagttggacaggcctggggactaccctataacccaatacccactgcatcagttacccctaaatcacctgattgataatcttctggttcgcggggcgttaggtgtaggttttggtatggatggtaagggcatgtatgtgtctaatattaccgtagaagattgcgctggctctggcgcgtacctactcacccatgaatcagtatttaccaatatagccataattgacaccaatactaaggatttccaggctaatcagatttatatatctggggcttgccgtgtgaacggtttacgtttaattgggatccgctcaaccgatgggcagggtctaaccatagacgcccctaactctaccgtaagcggtatcaccgggatggtagacccctctagaattaatgttgctaatttggcagaagaagggttaggtaatatccgcgctaatagtttcggctatgatagcgcagcgattaaactgcggattcataagttatcaaagaccttagatagcggagcattgtactcccacattaacggggggcccggttctggctcagcgtggactcaacttactgctatttcaggtagcacacctgacgctgtatcattaaaagttaaccacaaagattgcaggggggcagagataccatttgtccctgacatcgcgtcagatgattttataaaggattcctcatgttttttgccatattgggaaaataattctacttctttaaaggctttagtgaaaaaacccaatggagaattagttagattaaccttagcaacactttag

SEQ ID NO: 23 - DNA, 39162 bp, unidentified
  source 1..39162: mol_type = unassigned DNA
  misc_feature 1..39162: note = the genomic sequence of a bacteriophage
aagaacacctgttgtttacagataacgccagatgcttcgacctcgaagttgaatcatccactggtgttgctcaatacgctgaccgcctgttcctgtctgcaaccacagacggaatcaattacggtcgcgaacagatgattgagcagaatgagccgtttgtgtacgacaagagagttttatggaagcgtgtaggtcgtattcgtcgattaatcggattcaaactgcgggtaatcaccaaatcaccagtaacactatccgggtgtcaaattcgtctggagtaaaatatggcagacccgtcacttaataatcctgtcattattcaggccactcgtcttgatgcctcaatcctcccccgcaacgtcttcagccagtcttatctgctctacgtaatcgcgcagggggctgacgttggcgctattgcgggaaaggcaaacgaagcagggcaaggtgcctatgacgcgcaggtaaagaacgatgagcaggatgttgagattgcagaccacgaagcgagaattcagcagttacgcatcgacgtagacgaccatgaaatccgtattactgcaaataccaatgcaattgcggcgctggatatcagactaaccacggctgaaggaaaaatagtcaccttgcaggctgatgtcagtgctcttgatggtagagtggcgacggctgaaggaaatatttctgcattgcaggctgattacgtatcgaaaacagccaccgcaacacaatcgctggcgtcacctctcaacgtgacaacgtcctattcagttggtggcaccaaggttatcggcgctcggcagacgggatggacggcggcaacaggagcagcgcttctcggcgcattcaacgctaacctggcatacacggtcagtgccacatatacgcagtctgaggtatcagctatggctaccggattgcagcaggcgcgacagcgaatcaaagctctcgaagatgcaatacgaactcatggattgatcaactgatgattacattcactcccaccagaaacatcgacctgatagaaactgtcggcaaccatcccgacatcatcgccgggagcaacaacggtgacggatacgactacaagcctgagtgccgctatttcgaagtgaacgtacatggtcagttcggtggcatcgtgtattacaacgagattcagccgctgacctttgactgccacgccatgtatctgcctgagattagaggattcagtaaggaaatcgggctgacgttctggcgatacattctcgccaacaccaccgttcagtgcgttacatcatttgctgcacgcaaatttcgacacggtcagatgtactgcgcaatgattggccttaaacgtgtgggaaccatcaagaaatacttcaaaggcgtggatgacgtgacgttttacgccgccacccgagaagagttaaccgacttcctgaatcacgggagataaacatgttatatgcatttacgctgggcagaaaactgcgcggtgaggaaccttattatcctgaaaaaggcggtaaaggcggctcatcaagcagcggagcaaaagaggccgcaagagcaacacagtacgccgcagacctgcaaaaccaacaattcaatcgtgtgatggaacagttggcaccttacgccgccgcaggtttgccggctctccagcagattcagcagctatcaacactggaaggtcagaacggtgctctcaatcagtattacaactcagaccagtataaacagctggctgatcaggctcgctatcaaagcctgaatgcagcggaagccaccggaggtcttggctctacagcaacatcaaaccaaattgcatccattgcaccaacgctcgggcagaactggttgtcagggcagatgcaaaactatggcaacctgttaaacgttggtcagtctgcggcagcaggccaggcatcggcaggacagaactatgcaaataacgcaggaaatcttgcgcaacagatggcggctatccgctctcagggttctggtcaatccatgcttggaagtgccattagcggtggtacaagtggtgctcttgcaggagctggtcttgccgagatgcttggtgcatcgacgccatggggtgctggtattggcgcaggtatcggattgcttggctcactcttctaaggagttatcgtggctacatttcaactcgccgggttgccatcaatgcaggtagcgaaccagaacgcgcccggacaaccatcattatccagttacgacttcagccagcgcccaaacgttggagttcaacttgctcaggggcttggcgcagttggccaggcaatacagcagaatgaggctgctcagaggctttctgactttcaaaaagctttcggtcaggcttatgcggcaggtgatcgcgacgccttgcgtcaacttgcagccaccaatccagaccagattgaaacaattcgtcagggcatggggtttgttgatgctgacagaaatcaggcgatgggcgatatgtctgcacgattgaatattgccgccgctcaggggcctgaagcggtgatgcgagttctggccactcacaagaatacgctgcagcaaattggcgtatctcctgaacaggcgtggcagacatatcaacaaagccctgaaggcttcacgcagttaacagaccttattgggatgcacgcggtaggaccagaaaagtattttgatattcaggacaagttgacaggtcgcgagattgatcgaggtcgacttgctgaaacaatccgcagcaataaagcaggggaaggacttcaggctcgcgggcaaaatattactatgcgcggacaagacatgtcagcctctacagcccgccgcggccaggatttggcaatgcaaagggcaaactccagaacgatatcaggagtcgacgggaatcgggtcgttcagcttgcagatggtagaacagtcaacattgacggaaaacttcacggcgcaggggctaatgcattttacgaaggtattgacgataacggcaatatggttcgtgtcccggcaagtgctattgcagcgactccaacgtctgcagcaagcgcacagaactacgcgatgaagaaagacattgacgcaatcgcaaatgcagatgcttctgctctcgatttcatgactggcatgactggcggagcaggaaatccggcaattggtgcagatgttcgcagccgactcacaggcaaagaacaacgacagttatataactccgcacaacgtattcagggaagaatgcagaatcagggcgtggcagcagcaagagatatgggcgctagcggtatcaacaccattgcagaagcgaagatgtattttcagggtatgccgcaggttgactactcaagcccggaggctatgcagcagtctattcgtgagattcaggaatacaccaacaattataaccagcagtacaacgttgatgtcggtaatggtgggcagaaatcatcaaggcagcagccagctactcagcaatcagtcggaggaagctacacgtctaaatccggcattcaattcacggtggaataatgaaagttacagccaacggtaagacattcacattcccagaaggaacaagcactgaagatattggatcggctatcgatgagtattttgctggacagtctgcacagcaggaacagcagggcacttctacgaccccagaaagccagccacagcaacaaggtggcttcatttctaaccttggcaatgctgctgcagaaactgggcgtggattgctacaggctggcgttaatctggcaaatatcccggcatcaatggctgatgctgtcgccagcgccggggcatgggctggtcagaagcttggcattggtgacggaacttatcagccagcgcctcgcgtcacgacacaaggacttgagcaggactttggcttgcaacaaggtgcgcttactccacagacgacagaaggcaaaatcttctctgaagcactgccatatttgactcctgttggggccgagagaattgcagcgcaggcaccatctattgccggtcgagttgctcagggtgcatcacgcttgctggcggagaacgctgttggttcattggctgcaaacagtgagcgtgataatccaggagcactggcaacagacttaggaactggtgttgcattaggcggggcaatcaatcagttaggccgtgccgctggcgctgcttatcgtgggattcgcgggacgatcgcaccagaagcgcagcaggctattcagttcgctaatgctgcagatgttcctttgcatacaactgacgttttgcagccaaattcccgcgtcgggcgcatggcacaaaccacagctgaaaacatcccatttgccgggacaagcactatgcgagctaatcagcaagaagctcgcagtcagttggtagatgagtttgcatcgcgatttggtgaatacgatccgtcgattgtagttggtagtctgaaagcaaaaacgtcaggaataaagcgcgcagcggggaataggctggaacaagtgcaaaacgcaatggcaggcgtaaacattcagccgtcaaaggcaattcagcagattgatactgaaatagccagtttgcagaaacttggaaaggttgcggataacgatacgatttctaagcttcaggcctatcgcgatgagcttacccgcaatgctggcgcaagcggtccagtggcaatggatttgcagcagttgagcggactgagaagccagtttaggcaggatgttaaaggagagagaacggtcttgccaaaccgatctgacgcagctattcagcgcatttacaacgcaatgactagtgatatcgatagcgccatcggacagaatcttggtaatgacacactgcgtcgctataagcaagctaacgccatctacgctgacgaagcaaataagctacagaatacgcgccttaagaacgtgatcatgaaaggagacctgacccctgaagtggtcaacaacatgctattcagcaagaacaaatcagaagttcagaatctgtaccggtcagtcggtcaggtggggcgcgctcagatgcgcaacggcataatcggaaaggccatggagaaatcaggaggctcacctgaccagttcctgagacaggttaacctgatgtctaaccagaccggtatagcattcaaaggccgtgatgctgcgtatctgaaggggattaagaattatcttgaggcaaccaagcgtgccggtcaggcaggagtaacaacgcctacaggtcagcaaactataccgttcatcctaggtattggaacagtaactaaccctgcactggtaggtgttggtggcgggtatggtttgctggcaagaatgtatgagagtgaaccagcacgtaatgcaatgcttcgcctggctaatactccacgtggttctaccgcattcgagaaagcgttagccgaagttgagcgggctgttaactctgttgctcaaggcgctaaatcagatgcattaagcgaatagcagtctaccaactacgatgccgaagataaggaatgcaaagttcaataagtctctgttcataaatcctcgtaggaaccaatagagatcattctttgatctatatattatctgaatcccttacttaattgggtgatgataatgaaaaaaggtgtgatggttggctgtttttgtgtatttctcgctgggtgcgctacagcaacaaaaacgtatgctccagatggaagagaggcatataccatagaatgctctggagtaggtggttcatgggctatgtgtcaggccaaggccggagatctttgtggttcaaaaggctatgacctgattagcactggtagtgatcagggagctattgcaaacattgacggaagtactggcaacgcatttgcaacaaacaccatatcaagaagcatgtatatagcttgcaaaaaatgagtaaagcccggttcgccgggctatttttttcgatagaaatctttcaacttttcgaatactaattcttgaatttctctggatacgatgtctgcttcgcgttcagcatcatccctgtatccgattacaggcgtaggcttttcaagtgaatcagccactatctgcactagctctgcatttagtgaccttccgtttgcctttgccctctgcttaaccttttctttcagctcgtagggtagcctgaggttaaattgcgggtcatctcttcccatttctgatgcctcacttttgtaagtggatcggcatcatatgatctactggttgtatccacaataagaccaccgtggtcttaatgacgcattgccgtagccacgctgcggcgattccttgcatctggagcacattaaatgacagatatcactgccaacgtagttgtttctaaccctcgtccaatctttactgaatcccgttcgtttaaagctgttgctaatgggaaaatttacattggtcagattgataccgatccggttaatcctgccaatcagatacccgtatacattgaaaatgaggatggctctcacgtccagattgctcagccgctaattatcaacgcagccggtaaaatcgtatacaacggccaactggtgaaaattgtcaccgttcagggtcatagcatggctatctatgatgccaatggttctcaggtcgactatattgctaacgtattgaagtacgatccagatcaatattcaatagaagctgataaaaaatttaagtattcagtaaaattatcagattatccaacattgcaggatgcagcatctgctgcggttgatggccttcttatcgatgttgattatcatttttataatggagagaaagttgattttggtggtaaggttctgactatagaatgtaaagctaagtttataggagatggaaatcttatttttacgaaattaggcaaaggttcccgcattgccggggtttttatggaaagcactacaacaccatgggttatcaagccttggacggatgacaatcagtggctaacggatgccgcagcggtcgttgccactttaaaacaatcgaaaaccgatgggtatcagccaaccgtaagcgattacgttaaattcccaggaatagaaacgttactcccacctaatgcaaaagggcaaaatataacgtctacgttagaaattagagaatgtataggggtcgaagttcatcgggctagcggtctaatggctggttttttgtttagagggtgtcacttctgcaagatggtagacgccaataatccaagcggaggtaaagatggcattataaccttcgaaaaccttagcggcgattggggtaagggtaactatgtcattggcggacgaaccagctatggatcagtaagtagcgcccaatttttacgtaataatggtggctttgaacgtgatggtggagttattgggtttacttcatatcgcgctggggagagtggtgttaaaacttggcaaggtactgtgggctcgacaacctctcgcaactataatctgcaattccgcgactcggtcgttatttaccccgtatgggacggattcgatttaggtgctgacactgacatgaatccggagttggacaggcctggggactaccctataacccaatacccactgcatcagttacccctaaatcacctgattgataatcttctggttcgcggggcgttaggtgtaggttttggtatggatggtaagggcatgtatgtgtctaatattaccgtagaagattgcgctggctctggcgcgtacctactcacccatgaatcagtatttaccaatatagccataattgacaccaatactaaggatttccaggctaatcagatttatatatctggggcttgccgtgtgaacggtttacgtttaattgggatccgctcaaccgatgggcagggtctaaccatagacgcccctaactctaccgtaagcggtatcaccgggatggtagacccctctagaattaatgttgctaatttggcagaagaagggttaggtaatatccgcgctaatagtttcggctatgatagcgcagcgattaaactgcggattcataagttatcaaagaccttagatagcggagcattgtactcccacattaacggggggcccggttctggctcagcgtggactcaacttactgctatttcaggtagcacacctgacgctgtatcattaaaagttaaccacaaagattgcaggggggcagagataccatttgtccctgacatcgcgtcagatgattttataaaggattcctcatgttttttgccatattgggaaaataattctacttctttaaaggctttagtgaaaaaacccaatggagaattagttagattaaccttagcaacactttagatatgtaataaaaatgggtgtaaacacccatttttattttatggtaaatgttctatagctaattaaacctaacaactatggtttcccctacaacaccaatatcgtatacgttattaccagattttttccacccattttcaagtttcacctctttgtcatatagtctgtaatttctggagaacacatttctttgcattaacacctctgaccacatccaattattgttaataatgcgtggtattaactctctcattaaaggatgctttattactatgttttcatttattgatgcatacggttctgtgccaatgaattttatatttttcttgtctcttccaaatccaagataatctatgtcttgagatattctatttacaatgctttcctcaagctgaaactgtgcatttatggcattgtaagcaccataagaaaatattgttgatattaaaagaataaaagaaaaatatattcttgatattaactgcttatcttcaaaagcatagaatacgcataggcaacaaaaaaacataaagccacccataccaatcaataccctcggtgcgtatattggtgattttagaaaaatcattggtccaatgatgaaaaacattgatgctaataaaattaaaactactagcaagaactttgttttcttattttcatctcttttgattacttttaaaactatgactatcaaagaaatgattagcgcaaagaatagcgagtagtagattaagtaattatcgccattcaagatcgtgctaaacattctataaaatgataagacgttagaaattatcccttcaaataaacttgagtttatctctataatcttactatgttcgatattgtaagaacctgttacaagtctttttgcaataaagtaagaataggaaaaatatcctattattaaaccagcgacagaagatgctgtattttttgtgatatttgaaattgagtttttcttaaccacatctgaaattataaaggccaacaagaatattgcgtaagtattcagcgcagcctgataaagactaaggaatgcaatggttaaaatggatgatattatgatatttataggcttgtattgataagcgacatacgatgagataatagatattgccacactcatgcacattgttaatgaatcatatctatatgatagattttcaataaagaatgggtttgccaaaatcatcataaaacaaagagatgctgtgatgtagtcatctccaaacagcttttccctgacgcaggatagtgccaatgctaaaataactatccctagcattaaaggtagcggagaagcatctataattggggttccaaaattaatgatatagaaaataaagtcggaaagtgggcgaccattgcctgaccaacccaacccgccatataaagacctacccaagtcatcaacgaaaaatgattgatgtgtcaataaaggaaatgtatatataatcgccaatccaagaaagattgatataaatatcctgtcattactattaaatttcacttttaaaacccttacgctttaatatgtatttaggccgctgtttggtttctatgtaaattctaccaatatattctccaagaatacctattcctatcaattgaacgccacccaggaaaagaacagaaacaagaagagacgggtagccaggaacattatttccaaatattaatttatcaataatcatccatgcaccgtaaaggaatgacatacctgcaataaacaatccaatgtaagtccatatgcggagcggaaatgttgagaaagaagttattccctccagcgccaggttccataatttccagccgttgaatttcgaatcaccggccacgcgttcggcacgggcatatttaacaacatccgtttttccgccaacccaactgagcacacccttcataaacaagttgcgttctggcatttgtttgatgttctcgacaaccgcacggctcattaaccgaaagtcgccaacattttcttcgatttttggattgctgattttattgtgcagcttataaaaccactcagctgtcttacgcttcaacctcccatcagttgagcggtctgagcgcttagccagcaccatatccgcgccagcctgccacttctcaatgagatgggggataacttctatcggatcctgtaaatcgacatcaataggaatgaccgcatccccggttgcatggtcgagacccgcgaaaagagcaggttctttaccgaagtttcgcgtaaacgaaagcggaataacgagcggatcagatgcagctattttgttaattattgattcagtcgcatctttgcttccgtcgttgatgaaaacaatctcaacttcatacggttttaactcttcaaactcgcgaaccgttttatagaaaataggtatcgtggcttcttcattgaagaccggaacgactaacgagattttcatttcgcatccctaaagacaatgaactttgaataaatgaatccgcatatcaggctgatagctgaaaaggtgacaagagtaaggagtggcggcagggaacatttgtcagccatccagccaacaacggcgctcagtgttcccataaatcccacgtacatcatgtagcgaagcgtggtggtgctggcgttaaaggtgaagcgcgcattggcatagaagctgaacgatacggcgataacaaaaccggaaaagttcgccagcgcctgatgcgtatgcatcccatacacacaaaaagcaaatacgccccaatgaataagcgtgttaagaacaccgatcgatgtgtacttagcgaataacttcaacattatgaaaatcagcggattcggaaaggtctggagtgtagcactacaaattgctttgatcgatataaacgatcaataatgtaatctttgatagtttaaagttattgtttgcgcgttaattgatcgttgttaccgatcaatttttattgctgattgctaagtggtttgggacaaaaacgggacacacaaagctttgcatcggcttgcaaggctttgcatgtttttcgaagatgggacgtgtgagcgcaggtatgacgcggtatgttgttgacttaaaaggtagttcttataattcgtaatgcgaaggtcgtaggttcgactcctattatcggcaccagttaaatcaaatacttacgtattattcgtgccttccttatttttactgtgggacatatttgggacagaagtaccaaaaatcgagtcaatttgtcgagcatgttcagtcaggtgatttggtgccagatgagcatatcggcgaaccatttcgatagactcccagccacccatttcctgcaataccgaaatcggaacgccagcctgaactaaccaacttgcccacgtgtgcctcaggtcatgaaaacggaagtcttcaatgcccgctcgttttaatgctgccctccatgcagtattagcgtcatagcgcatcttcctcactacaggtgatttagttccgtctggtttggtgctgctttccttgtagacgaacacccatttgtgatgattgccgatttgctttttcagcacccggcaagcggtatcattcagcgccactccaatggcatgattagacttgctttgttccgggtgtatccatgccacctttcgttgcatgtctatctgctgccactccagattgataatgttagacctccttaagccagtagaaagcgcaaactctacgactgactttagcggttcctggcattcatcaatcaacctttttgcctcgtgaggctcaagccagcggatacgcttatttttcggctgaggaactttgatgatcggagccttatccagcatcttccattcgcgttcagcagcccggaggagtgccttaatgaatgaaaggtgagttgcttttgtggctactgctgccggcttaggcttgaatactggaggctgcttcccattcttcctgcaagcttcatccattaacttccagttttcctcatgccgccgattagtcatcttctggatggcggagtaaatcttcgtctcggtaatatccttcaactgcatccctgcaaaatgctggagccagaatcctatccgactcttgtcatcatccagcgacttcttatgcgccttctcctctaaccacctgacacaggcctcctcaaaagtcatgccaggcgtctctcctaatttatttaccctccatgcttcggccttcagcttgtcatgaagctctgtggcctgccttttgtcctttgtcccaagagactgcttaaatcttttgccgttcggcaatgtgaaactggcgtaccaggtttcacctctgcggaatagtgacatttcagttcctctgttatgtcatcacccgcgctcacttggacagtatgcagcggagattgaagtgccgcaacgcaggcttgtcgtgtggtgaggtaaggggatttaggtttggtggggtctttacgtgttgcctgtagtcggcctgtgcgaatccagtttgtagcggtaggtctggatattttgagaaatgcacaggcctcatctagtgtgaggctgtgtgattccatggttactcctggtcagaaagaagctcttctatccatttatatgtttttggtgctcgcttatctggcctcttaagctcaagcttaagcagagcaataagtgaatcccactcacgtaaaatcggagaaaaccgctttacctttttcgctatgagcggaaagctatctttaatttcaggtatttcatctacgagcatcatgcatcttcgcaaatcggcagggtctcttggtgcgtcaaaccgtccgtggtagaagttcttttccagcccaagagcaatagaagccatagttgcgctacttattccaacgtggcctttcgtttgccacctcaataccttcattgctaaatcagacatcattcactccataaaacaaaacccgccgtagcgagttcagataaaagaaatccccgcgagtacgaggatgttattgctgcggcggttctggtagtggcatccagtgcaaggcagcccctaaccacgatagagtgccatcgttcaactccacgtattccccttgcacctgtcctgccaaatactcgccgtactttgaataaattaaaacccaatcatcttgagcaggcattcgctcactacagcttatccaaccacccggagttaccggagagttgccagcctgaagcatagttttctcgtaatctgcaacctgcgggtctactggttgtgataaatcgcggaattttccctgaagcatggcggcgcggcaggaatccataaattccagcgctgtcattaggtcgcgcctgttgaccttgcaagaatgctcatcgatgtggcgccagtcacttagatggtctgcctggtactggaaacgctcaatgatgccactgatatcttccggcactaccggcgctggcggggaggcgtagagcggaactccaaagcgaccgcaggaaaactcattgctgctgttatattctcgcccttcttcgtcttcacacatccacgctacaggctcagcggtaagcgataccaacgcgatacgcgccagctccatttgttcgccacgggtaagcccgttttcaagcggtgatttaacgaacaattcaatacgttctttggtaatagtggtcatgggttagtcctcaacgctgatatcaacggccactttcattcttccggcagaaacttcaaaaccggtgacatccgcattaagcatgtattcagatataaccagcgcaagaagttttaacttcgcgtctgcatcgttaccgttcaattcttcaagcagctcaataactggttccatatgttcacccattttcatgctcactccccttaaccttgataccagcggcggccaatgcttttgctttggcgcatagctacgtgttcagcattacgttctgcaagctgattcatggttaatccatcgatatccgctttcattcaggcattctcccctacaaagctattaacagccttgcttaatgtcagaccaagactttcaatatgcttctgtagctcctgaaatgattgtgcttctgacgccagaatttcgcgatggcataactctttaaccagatgctcaaacttgctgtagtaaccgcaacgtacaagaacttcattgccgaaatttttgcttttttcatcggtaactttcctcttctcgtttagaataaggtcgtgcttggttccggtaataacgtatttaccgaggtcgatgtttagcttcattattaattcctcagttattgctgatagcgccgtaacgcgaacggtaatcacgaaggcgcgggtctgtttcaatgaattgggtgtaagtggctttgcggaatggccggatggatgtctggtaaattcgctcgcgttcttctttctctgcaagccatatacagtggcgaaattccttttcctctttcgtttcctgcggtagcgacattatcaggtcgtagttttttctgaatttatccagcacctccgagacggaattgccggaacagcggcgcgggtcatccgcaccatacagaggcgctggcataatttactccagggtcggttatccgaataatgtgttaggtatagggttatttctttcgtaaacgtgatagcctgctttttaccgactcttcacttcgtccgagaatttttgctacatttctttgtgtatagcctgatgagataagcgcctgcatttttttgtcttcgttttcgctccatcttggcttaacgaatgccgtttttaatgacagtttttttgctatgtaataaaactgatttatgtttaggcccagatgttctgctgcacggcaagctaccatgcggccgcaaactgattccatctccgctggagttatatttaaccttctcattaagccacctgtttaagctcatttattctgatattcattacctgaacgcatttagcctgcgcatcctcgtgaccagccattaattgccagtcatgctgataacgctcaatgagttttttcttatcagtttctgttactgcatattcactgaagtctttcaggatttgctcgcagtcaaccgatggagatttctggttggtattttctggtgatggttgattgcctgatgctggtattgcccagccaggcagtgatggagggagccagtaaaattctgttccatccttcagttttgccctgtgccatccttgtttcttatcattggatatctgcgcaaacccttcctcaaggttatacagataccgaccaatcccccactgaacggcagcacgcttcattgcgccggaacgaccgccttttatggcttctacctgtgtgttttcagcagcatcccatttggttacccattcagaaccaatctttattgatatgccgcattcaacgccgccgttattgggaatatcacgatactcgttgcgccatccagccttaccgcaaacatcatccagtcgtttcatgattgccctgttcgtgacataagccagcaccaaagcccacacctttccatcgtgcattttcccgcttcgctgtattcgccactcgatatcttcaggattgaatggagcgtcgaatttattcaaatccataattcacctcagaatggcagttcggaatgattagccagaaattcacctttgtttattcgctcgtttttggctaatgaaaggcaatttcttttcatcgatttattacctgacttgcgccagtatattgcttctgccaggtgatactgacgttttaacctgctcaactccggtgtccttgctaaatccactggtatcattacctttctcctgttctttgtgctgactaagcatttcgttcatcaggcgaatgaaagtttcgtctgaccagttatctgtaaaactcatggacggccttgttgtttcaaaatatcccaaagcttttcgagcaaacttttcattcttggttgtttaaagtctgctccggttaaaatgttttttcgtgaatgctgtaccgataaaatcgggttgaaagggcgaaccgatgccgcccctgcaatagcgaactgctgcataggatgctccttctgtttgattgcataacgaaaacgcctcgagtgaagcgttattgttatgcatataaaaaggccctcacatcggagggcaaagaagattttcaataatcagaacaagtcggctcctgtttagttacgagcgacattgctccgtgtattcactcgttggaatgaatacacagtgcagtgtttattctgttgtttgtgccaaaaataaaggccgactatgcgtcctgaaattacttaaccaatgatgctgcatattcgataaggtaaagttttggagcaagccaaattttcagccagtcgaaataattgaagaaaacaacaatagaagtaatcgctattcctgatgtgacaagtagtgataaaagaacaatatctgcatcatctcctttattccatgcaaaaatcatcagataaacacacgctataatcaccaatacacagatagcctgaattccagctgatgatacggcgtgccacatcaaaagctgatggatgacatcaggaatctgtgcctggctaaatgaaacagccgcgtctattccattgctggctttttgcagtagttctacgagaatcttgtttgcttgttcttccatatatcaccttaaatagtggcttgcggtagtaaagattgcgcctgtcttttaaccacatcaggctcggtggttctcgtgtacccctacagcgagaaatcggataaactctattcacccctacagagagcaaaagagaatcgccgatgaacaactcatggtggcaggaactaatgcattttttcctgcaaggaatgacacttaaacagttgattcatatgctcatcatcctgattttactgattgtcgttatgccggtaagcgtgaaagaatgggtaaacctgcataatccagaaatccttcctcagtactggatgtattacatcctgctgttctgtgttagctatgtgctgaatggtgttgttaattctgtttatcatgccgtgaatgaaagaattgaggcatcaactgctcagcagcgtaaggccagagaagaaaaagtcgtccgggatctgtttgattcgttaactcctggcgaaagagcgtatttggctttcgccgtagccgccaataatcagctaaagacggaaaaaggaagccctgaatcaatttctttgctcgaaaaaggacttatcactcgcttgccttctgttattggatatcctgatattgaccgttttgttatcccggaaaagtattttaatgagtgctacatgagatttgccgggaagtcagacattcttatgaatgaacttattgcacaggacgaacagctcaaaaaataacgacttaaccgacaaatgttttacctcgctgttatttgtttgctcttacgatgaccagccgcgtaaagtgctacgtctggcaaacatacaccggtttctggtggcttatgtccaaactcatttgcgtacacaatggctgcccgctccagattgcgtctgtattcttccagttgccagaatgcatctttcgccatgaactgaagtgattttgcgtcttcaatgcgttttggcgtttcgtgttttcctttggcctgaatctgggcccggctaagggtggggcggtgcaatacttctgaagttattgcctcttcgcgagccagaacgccattagctaatgcctttgcctttaaacgctcacgacgacgagcacgtgaagtgcctttgaactgtgttctgcgtgtcatatagacctcctgatgaactttggtgatgcgatgccagatgcttatcttctggttgcctcgatggactgcaattcatcgcatcccaaagctcactttggttattgctcgttgacggagccgtagattcatcactgaatcgttgtatgttcaccatcctggtgagtagtgtgtcctgttgatgtgtttagtatacgtatagtaaacatcattgcaaatacattttgtatcctcatggttgttttgtttacattgtgttgatttttaaagtgatttatttttttaaatcctctatgccatactgttctgaacaaaaaacgagcgaggaatcagtgtgaaaagtgaggatgagttctttgcggagcttcacccgcaggtggttgaggttctcggtactgcgctgatgcaggtactggtagagcagcgcgaaccttcgcgtgaagctttgatagaaatgattcaggtactgtggcaggaagaggatgtggacttggctgtagaactggctattgatgttctgacgctgccgaaagagtagggcaaagaaaacccggcgcggtggccgggcgtgatcgcttactcatcttcatctagcaactcaaattgagtcccgggcgatggaaaggctcttttgaatgctctgtcaaactcagctttatttcttgagcttgaaaggatgccaactacctgccaaaggtgcgccctaaacatcggaactccgatgctatcggttaggaactgaaacatcttatatcttctaccgccattcgcataaacgacagggtttttttcatctagcatctcaaggatggcgcctttacttgatgctaatggttcgtagatatacttcctcgtaaacttaccgaaaaactgagggtgccgacctgcttttttctgcgtaagtccgtaaagtcgataaaggccatccgtgaactgcttcggaaattccttctcatattctctgacctgctctttgatgaactcttgaaagagaattcgatattcatcttgtctcttttcatcgatatgcccagtagcttcgtctaccagcgctacaataccaacctctgcaagaccgcgcatgataatgtctgcctgaacagaaataggtatctgagatgactgaagggcatcaccctgatctctcatcttcaaataaacattgcatatctttgggagcaaagatgcttcaatgccgtaagctggcgccgctcctttatttattttgaaaagacggcgccgggataggccttctgataattcattattaatgaatggcttaatgtttttagctgacaagaaaacaggaagataggcgccatctggattctctttcattctcttccagtgggagcctccacgcttcccgccgaaggctttagtgatagctctctctgacagaaccctcgtcccatcctcaagcacggcacattgtatctttaagtctccaatgacaatgtcgccagatcttttggcaatttccacctcaccatcgccaccccacctagctgctgcggcttttcttgcaatagccgacctttcttctgcagaaagagcattagcccttgccacaccacctttggactttcccgttggttctttgctttctttatcagacattatgcaagcactctttgttgtgaaatgtgcttgcataatatcaagtatataaattaataagcaagcatatattctatcttgagtgcttgcatttttttgtaaaaaggccgcatttctgcgacctgtttcacacaatcactatcacccaaacatcccttcggtccatcatcacccgaatatctcatcaggccattggctggctacaaccttacctacaaccctgcattgttcgttacatggcattattgggaactgagggtttagcggttgtaggaatacttgtccgctgtctttgatgagcttcttaaaagtgaactcatcaccacataaccttgcaatgcaaaaatcgcctgggtctacaggaacttctgggtctacaagaatcagcattccttcaggaaagcttggtcgtgatcccgctggagccgtcattgagtggccttcaacttcaagccaaaaagatgaatcactggcttttttggtcgtactaatccagcattctgcatctctctcggtgaatgtgcgaaattctggtgtaaacattccagcctgaacgtgagagaagaatgggtattcaaattgaggtttaacaggcttttgttctgttgattctccaacgctaaaggttccgtcagcgttgaacctcacgtctgtaactccaagatattgaaaaattgctccaatttcttgtattgatgggttccttcttccgttaagccaatgactaacagcacctttggttacaccaaggtgttcagcaactttatcctgattcaatccaagctgatcaatcctttgcttcgctatgtcataccagttcattttcatccttaaattatacaatttgtatcaaacaagaacagtcacaaatcgtaaactatgtattgcgatattgaatacgatgtgtatacttattggtgaggaggagcctatgaataatattcgcaattttcgcgagcgcttcggtttaacgcaggaagatcttgcgaaagtactcggttgtacgcgtggtgcagtttgtcattacgagacaggcagaaggggaatggacatcaatctttgtcgcgcttttatcaatgcgttcaaagaatacggttacgaactaaccatagacgatctttttccaccaaaggctgcgtaagcaacaccacttccaacaacggacattcgtcctacgtcgctgacaaggcgaatccagataacaaatcaaccacaggtttatgcgccagtgcgcatagccacaactaactattaactacaggaaatactaagtaatggagctcacaaatcacagcaaaaagatacgcgaggtggaaacagagcttcgcgcccggctcgtatcaatgggccagacaaattttgcaaagatggcgggatggtctgattcaaaagtaagccgtctgaacattcaggatatggcggtgacgttcgttcttctggagaaggtgtgggagacgagtttaatcagggaagtggcaaggcaagcagtggaagctgtgatgccgagaaataaaaaacgcccggcggcaaccgagcgttctgaccaaatacagatggatttctaagggcatcaggagaggtaattatgacaaaacgtagtaagaaataccaggaaaaagaagagattcgacatcctgattcacctgagggattagtggtagccgcagcaaataacagggcgttcgcagagcgccttgttggtgtttacagactagccaaagcaggagtgaaacatgggcgtcgttaagttagctgattacaggcctcatctggaggtcgtggagcatcgcgtggcagataccgaagatggtttcatgcgcgttgctaacgagattaccgacagtctgctgatggctgatttaaccgtccggcagttgaaggtgatgctcgctatcatgcgcaagacatacggattcaataagccgatggatcgactcacaaacacgcagatagcagccatgacaggtattcatcacactcatgtttgcgctgctaagcgccagcttattgagcgtaaattcctcattgctgatggcgtgaaaatcggagtgaacaaggtggtttcgcagtggattagccaggacagcttaacattagctaaaacagctaataaaacattagccaagtcggctaatggatataagccaagtcagctaaacacaaaagacaatatacaaaagacaataaatacaaatacccccttaccccctaacgggggcggcgatgggcaggttaaacctgaacgtcgcaaggcagaacgaatcgactacgaatccttcctgaacgcctacaacaccgaagtcggtgacagacttccacatgctgttgcggtcaacgagaaacgtaaacgccgcctgaagaaaatcatcccgcaactgaaaacgccaaacgtggacggtttcagagcgtatgtcagggcgtttgtgcatcaggccaagccgttttacttcggagacaacgacactggctggacggcagattttgattacctgctgagggaagattcgttaacgggagttcgggaagggaagtttgcagacagggggattgcatgagacaggatatcgaagcgagcgttatcggtggcctgctgattggtggattaacaccaaccgccagtgacgttctggcaacgctggagcctgaagcattctcaattccgctttaccggaaagcttttgaagttattcgaaagcaggccagaaacaggaacctgattgatggactgatggtggccgaggagtgcggggatgaatatgcaacggcggtgatgatgactgcgcggtcatgccccagcgctgcaaacctgaaaggttatgccggaatggttgcagacagttatcaacggcgtcaggttttacagctactggatgagatgcgagagccaatcagtaacggcacgctggatgcttcaggtagagcgatggacgatcttgttaagcgtctttcagccatcaggaagccacgtgacgaggttaaacctgtgcgactgggggaaattatcaatgattacaccgacacgcttgacaggcgtctgaggaacggagaagagtccgataccctgaagaccggaatcgaagaacttgacgctatcaccggagggatgaacgcagaagacctggttattatcgccgctcgtcctggtatggggaaaaccgaactggcgctgaagattgccgaaggtgttgcaagccgcgttattcctggttctgacgtccggcgcggagtattgattttctcaatggaaatgagcgcattgcagattgcagagcggagcattgccaacgccgggaggatgtcggttagcgtgctgcgaaatcctgcatcgatggatgacgaaggctgggcgcgtgttgctaacggcatgagtcagcttgcagatttggatgtatgggtagtcgatgcctcgcggttatctgtcgaagaaattcgctcaatcgcagaacggcacaaacaggaaaatccaaacctgtcactcatcatggcggattatcttggcctgattgagaagccgaaagcagatcgcaacgacctcgcaattgctcacatctcaggaagcctgaaggcgatggcgaaagacctgaaaacacctgttatctccctgagtcagctttcgcgcgatgttgagaagcgaccaaacaaacgcccgacaaacgcagatttgcgtgattcaggaagcattgagcaggacgcagactcaatcatcatgctctatcgggaagcggtatatgacgagaacagtagcgccgcgccatttgctgaaatcatcgtgacgaaaaaccgttttggctcacttggtacggtttaccagcggttctgcaacggacactttgttgcatgtgaccaggatgaagccagacagatttgcacagcatcaaatgcacctgctgcgcgtggcagacgatatgcacaaggggctgacgtatgaccatctacatcactgagctaataacaggggctatttacacagtagcccttttttattggattaagaacgagggggatcctgatggacaccgttaacggaatgtgttcagacgcaccgcgtgccaagaaatgtaaatgcggaaaatcaccgacaatattcgacatggagaacgggtgccaaatctactgcgctaaccacgctgctgtggcggccgcgaattatcgcagtgcggtaacggagtggaataacctgaaatctgttagagagggaagtcatgaaaaaactaacctttgaaattcgatctccagcacatcagcaaaacgctattcacgcagtacagcaaatccttccagacccaaccaaaccaatcgtagtaaccattcaggaacgcaaccgtagcttagaccaaaaccgaaagctttgggcttgccttggtgacgtctcgcgtcaggttgaatggcatggtcgctggctggatgcagaaagctggaagtgtgtgtttaccgcagcattaaagcagcaggatgttgtccctaaccttgccgggaatggctttgtagtaataggccagtcaaccagcaggatgcgtgtaagcgaatttgcggagctattagagcttatacaggcattcggtacagagcgcggcgttaagtggtcagacgaagcccggttagcactggaatggaaagcgaggtttggagacgccgcatgaaacactgctaccgctgcggagaaagcaaagacgattatcgattccggccaaatcaaccttattggcaccaatggtgtatcagatgtgagcggtcgccagtaggtaatttcccgctgccagagacgaaggaggacgtatggcacaacagcgacgaagtatcaccgacataatctgcgaaaactgcaaatacctaccaacgaaacgctccagaaataaaccaaagccaatcccaaaagaatctgacgtaaaaaccttcaattacactgctcacctgtgggatatcaggtggcttagagaacgtgcgaggaaatgacaatggattattcacagttaagtgattttgaaattaaccgaatggtaggagacataatttttaaaggcctttgggcatgtaagccggaaacgtcagggaataacaccaacaaatggtattacggaaacgctgatacaacttttgagccattaaaccatttacctgactactgcaatgatccgagtgcctcatggccgattattgagaaacacaggatttctatcttagaccagttaactgaatggtgtgtggatgcaaacggcgtaagcccaatatttgataccagacctctccgcgccgccatgattgtctttctcatgatgcaggacgccaataatgcttagtccatcccaataccttcaataccagaaagaaagcgtcgagcgggctttaacgtgcgctaattgcggtcagaagctgcatgtgctggaagttcacgtatgtgagcactgctgcgcagaactgatgagcgatccgaatagctcaatgtacgaggaagaagacgatgagtgatttatctgagcttatttccttcaaaaaagacagagaagaaatgcggactgaatctgtctattacgttcaacaccggaataaacgctcggtgcttgatcaggagctggttattaccggagacctgtcattcagaacatataaggccagcatggaaatgaaggatttccctaaatgtggttctgaaagagaagccgcgttaaagctggctgagtggatgcagagaatggctgctgcaattgagaattactggagtgaaccataatggctaacctacgcaaagaagcgcgcggcagagaatgccaggtacgtatttacggcgtatgcaatggcaaccctgaaactacagttctggcacattaccggatggctggaatttgcggaactggaatgaagcctgacgacctgatcggcgcatgggcttgtagcgcgtgtcaagatgaaatcgaccgacgcacccataatctcgacaacaaagacgccagactttaccacctcgaaggcgtgatcaggacgcaggcgatactgctgaaggaggggaagattaagtcatgaaaacataccgaataaaattgccgtggcctccttcaaacaaccgatattggcgacactcaagagggatccactacatcagcgattggggaaagcgataccggcgagaagtaatcgaaataattcagcaacaacagctagaccttaaaatcacaccccgcatcagaatcaccattctcgcagcacctcccgataaccgcaaacgcgacctggacaatctaccaaaggccgtttttgacgcactcactagtgcgggcttctggctggatgacggccagatagacgatatgcgcatcaagcgctgtcaggcggttaaaggcggaatgcttgtactggttgtgactgaaacctgtgggcgcttgccaatgattacagagctactggaggccgcatgagcgaatgcattatctggaaaggttgtgtgaagaatggatatggatggagaacatggagaagacaaacaacaacggcgcataggattgaatactgcattgcaaaaggtatcgctctggcagatatcgaaggaatgattatcaggcatcaatgtgacaaccccttatgtatcaatcctgatcaccttgtcgtcggaactcaacagcaaaacgttaatgacatgtatgagcggcatagggagtgtagaaaaatacccttagaaatcatttcagcgattaaaaatgagtacgttaaagggtcttcaactcacggttctcctgcgcttgcaaagaaatatggggttagccagccacatgtaagccagatcattaatgggacggcgctgtcaggctcctctatatcggattatgtctcggcattcggagacagaaaaatgatatctgaatgggcgaaagacgagagatgcacagtcacagccaaaaccattctaaggcgaattctttcaggcattccgcctgaacaagctatttcctccaaaagaagaccagatatccgggaggccgcatgacacacactatcaaaaccattccagacatgctcatagagacatatggaaaccagacagaagtcgctcggcgcttatcgtgccaccgcaacacagtcaggcgttatctgtacgacaaagaagccaggcatcacgccatcgttaacggcgttttaatgattcatcagggcgggagaggtatttatgaccgtaaccagcattaaccaggcgaaacagcagagtgaacgtgacgaggctgaattgcgcagcgtcagagagatgacggagcaacaccagaaggcgatggattatctgcatgagcgagagcgagaactggtgaaccggcttggattgaacaagccagcgggaggcgatgctgcatgagtatacgagaattgaacctcactaaagagcagcatgactggcttaatgggtggcttgagctatggggggcatgggtttattcgggtcgtctggaaaagcgcatgagcagcgtaatagcgaagttcatggagagcgtagagccgggaagagttatgacaagaccaatgtgcaatgatgatgatggaatgttgatttctcaggtcgtcgattccgtcatgtacattgacaagaaagcctttggcatcctcctcagctactacgctcatggttcatccaagcgagcaattgcatcctactatcacgcgactgcaaagccacgcaagatgtgtggacggggtggcgatggatggagaaaaccttcactggcaacctgtagaaatgaaattgacgacatcctgaaagcgtcattatttgttttataccagccaatgcaaaatgctttcaaaatgcgtaaacgtgttgagaaagttaagcatgttgctgttaaaagtcttgacatgcaattatccatttagccataattagagggtaagctgccgttagtgactcttaagttgcaacggtggcttttttatttgggtcagtcgtataaaggtcattacggaaggctgttaaccttcttatcgtggttcgagtccacgctgtccagccaaacatgctggtttagctccaatggtagagcagtcgccttgtaagcgaatgggtagcggttcaagtccgttaaccagcaccataactgagccgtagccactggctatcctgaattcgtcagtgatagttatgctgcggccttctacacatgaccttcgtgaaagcgggtggcaggaggttacgctaacaacctcctgccgttttgcccgtgcatatcggacacgaacaaatctgattactaaacacagtagcctggatttgttctatcagtaatcgaccttattcctaattaaatagagcaaatcccctcaataaagggggtagagcatgtaccgtatggacaaaatcagagaatggttcagttacagcttcggaggactgactgcgatgggtggcattctctccctgaatgactgggctgtaatcattggtattctttgtactgtcggcacatttggcatcaactggtactacaaacgcaaagagcgtgaggacagattgaatggcaatgtcaccggcactacgaaatagcgtaatagcggcgataagtggcggggctattgccatagcatctgtgttaatcactggccccggtggtaacgatggtctggaaggtgtcagatacaaaccatacaaggacgtagttggtgtgttgactgtgtgttatggccacgtcggaaaagacatcatgctcggtaaaacgtataccgaagcagaatgcgaagccctcctgaataaagaccttgccacggtcgccagacaaattaacccgtacatcaaagtcgatataccggaaacaacgcgcggcgctctttattcgttcgtctataacgtgggcgcaggcaatttcagaacatcgacgcttcttcgcaaaatcaaccagggcgatatcaagggcgcatgtgaccagctacgtcgctggacatacgctggcggtaagcaatggaaagggctgatgactcgccgtgagattgagcgtgaagtctgtttgtgggggcagcaatgagcagagtaaccgcgattatctccgctctggttatctgcatcatcgtctgcctgtcatgggctgttaatcattaccgtgataatgcaatcgcctacaaagagcagcgcgataaaaaagtcagtgaactgaagcaggcgaccgccaccattactgacatgcagcagcgccagcgtgatgctgatgcactcgatgctaaatacacgaaggagttagctgatgcgaaagctgaaaatgatgctcttcggcgcaagcttgataatggtggcagggtgctcgtcaaaggaaaatgccctgtgccatcctcagccgaaacctccagcgcctccggcatgggcaatgatgccaccgtcgaactctctccagttgctggacgaaacgttctcggtatccgggacggaattatccgcgaccaaacagcactgagaacgcttcaggaatacatcgtgacgcaatgcctgaaataatttccatcacatagaaatttgacaagtgactttcatgaaaatgcctcgtaatgcggggcttttttatatccgcagtaaaggcgcttcacacgcgcgacttctgaacacagaacctttcaggatgacccttgaggatgccggtttggcgatcggtgcctttctgtgggccggaatcctgtgtgacaaggttcatcacttaaaggtaactaccgatgcaattagttgaaatcaagaagctcgacttggtcactaactccgctgtaatcgctactggcgtcaaaaaggatcacaagcctgtgattcagctcatcaggaagtacaaaagcgacctcgaagagttcggaagggtggaatttgaaatgcgaccctttcaaacggatgggggcatgcagaagcaggaaatagcactgttaaacgaacagcaaaccacgctgttgatcacatacatgcgaaacaatgaagttgtgcgtgaattcaaaaagcgcctggtagctgaattcttcactatgcgtagcgcgctggcgaaaaagaaaatggatcgcaactctgcacgcctggagtacaaacccatgaccgacgccatcaaacatgagcgagaggctcagggtaagcagatcgccccgcatcacttcagcaacgaagctgacctgattaaccgactggcgctgggaatgacggcggccaagttccgcgtgcatcacgaaatcgggaagaaagagccgatccgcgattacctgacgccggaacaaattcactgcatcaccgagctacagcgcgccaacacggtattcatcagcatggggtgggacttcgaacaacgcaaagaggtgctgcgcggcatgttcgagcgtaatcatcgtcagccgcttatcgaagaacagcaccgcctggcggcctaagctacggaaatagcttcgagagccactttcacaacggctctccattacaaagcccatctacgggtgggcttgataatgaaacctgagtttatttcctgtcaaacaatattcaattagcagcagtacagcgacataacccaagccagtaagtggggaaataacactggcagccactgaaagatgaacctcctgccttatggcaaaaaagattctttgcggtggcggactgatggaaagacatcggttattgcagagaccattcagtgagtggcctcgacaatggcttatcccaacaaccggagccaacacaatggcagagattacagcattgacagaattacagcagatgaacctcgatatcctccgtttagtacaaagcgataccgcagcagcagagaaagcgatcgcattcgttgctggaagtaagctgaacttcgaactgttcaaagaccaactggttttggcgcagggtgaaggaacggcattagctcgcgcagaaaaggctattcgtgaggcaaaagaagcgttagacctgttcactgccggagtataatcatggcaaatccaaatttcacgccatcgtggcctctctacaaagatgctgacggtgcatatgtgtctgctcttccgattaaagctatcaaatacgctaatgacggaagtgcaagcgcagaattcgatggtccgtatgctgaccagtacatgtcagcgcaaacagtggccgtattcaagccggaggtcggtggatatctgttacgaagccagtacggcgagctgctctatatgagcaagacagcatttgaagctaagtacacttccgcaagcggttcagtaacgaatgcagatacggcggataagttgtcaacggcccgtactatcacactaaccggcgctgtcacaggttcaacgtcatttgatggttcggctaacgtgactatcgcaactacccaaggaagctaacttatggcagcaccaaagggcaaccgattctgggaggcccgcagtagccatgggcgtaacccgaaattcgagtcgcctgaggcgctgtgggctgcttgttgtgaatacttcgaatgggtggaagctaacccactatgggagatgaaggcgttctcatatcagggtgaggtgacacaagagccaatcgccaagatgcgagcaatgaccatcactggcctgactctattcctcgatgtgacgcttgaaacatggcgcacatatcgaatgcgagaagatttatctgaggtcgttacgcgagcagagcaaatcatctacgaccaaaaattctccggcgcagccgctgatcttctcaacgctaacatcatcgcccgagatttgggcctcaaagagcagtcgcaagttgaagacgtgacacctgataagggagatcgcgataagcgccgctctcgtatcaaggagctattcaaccgtggaactggacgcgattcttgatagcctgagcgacgaagagcaaatcgaattgctcgagctactcgaagaagaagagaactaccgaaatacacacctgctatatgaatttacgccatacagcaaacagcgtgagttcatcgatgccgggcatgactatccagagcgatgttttatggctggtaaccagcttggtaagtcatttactggtgctgctgaagtcgcgtttcaccttaccgggcgttatccgggaacaaaaggctatccggctgatggtaaatatggcggagagtggaaaggtaagcgtttctatgagcctgttgtcttctggattggcggcgagacaaacgagactgtaaccaaaacgactcaacgcatcctgtgcggtcgtatcgaagagaatgacgagccaggctacggttccataccgaaagaggacatcattagctggaagaagtctcctttctttccgaaccttgttgatcaccttctggttaagcatcacacggctgatggcgttgaagatggcatttcaatctgctacttcaaaccatactcgcaaggccgtgctcgctggcagggtgacacaatccacggcgtgtggtttgacgaagagccaccatacagcatttatggcgaaggtcttacccgtaccaacaaatacgggcaattctcaattctgacgtttaccccgctgatggggatgtctgacgttgttaccaagttcctgaagaaccccagcaagtcgcagaaagtggtcaacatgaccatctatgacgctgagcactatacagacgagcagaaagagcaaatcatcgcatcctatcccgagcatgagagagaggcgcgtgctcgcgggattccgacgatgggtagcggtcgaatcttccagataccggaagagacgattaagtgtcagccgttcgagtgtcctgatcacttctacgtaattggcggtatggatttcggatgggatcacccacaggcgcaggttcagctttggtgggataaggacgcagacacaatctacgtttcacgcgtgtggaaggcgaaagaaaaaacagctgttcaggcatggggagccgttaaatcgtgggcgcataaagtgccaaccgcatggcctcatgacggaaaccagcatgagaagggcggcggtgagcagctcaaagggcagtatgccgacgctggttttatgatgttgcaggagcatgcgacatggcctgatggcggtaatgctgttgagcctggcatcactgaattgcgcgacatgatgcttgatggtcgcttcaaagtattcaacacctgtgagccattttttgaggagtttcgcctctatcaccgtgatgaaaacgggaagatcgtcaagcttaacgacgacgtgctatcagccgttcgctatgcatacatgatgcgccgcttcgccaaaatgatgcgcgacatcaaaaaaccaaaagagaaaaagataccagccccaatcaggcccatcgcacggagaacttaaatggccgacgaaaacagactcaattccattctgtgtaagtttgacgcagactggatggcgagcgatgaagccagaagggaggccaagaatgatctcttcttctcccgcgtatctcagtgggatgactggctatcacaatacacaaccctacaatatcgcgggcagttcgatgtggtacgtcctgtggtgcgaaaactcgtttctgagatgcgtcagaaccctgttgatgttctgtatcgtccaaaggatggagcaagtcctgacgccgctgatgtgcttatgggtatgtatcgtacagacatgcggcacaacacggcaaaaatcgcggtcaatgtcgctgttcgtgagcagattgaatctggcgtaggtgcgtggcgtctggtcactgactacgaagatcaaagtccaacgagcaacaatcaggttatccgtcgagagcctatccatagtgcctgctcccatgttatctgggacagtaacagcaagctgatggacaagtccgatgcccgtcactgcacagttatccactcaatgagccagaatggctgggaggatttcgcagaaaaatacgacctcgatgctgatgatattccatcattccagaaccccaacgattgggtatttccatggctgacgcaggacacaattcagatcgctgagttttacgaagtggtcgagaagaaagagacggcgtttatctaccaagacccggttacgggtgagccggtaagctactttaagcgcgatattaaagacgtcatcgacgacctggctgatagtggatttatcaaaattgcagagcgccagattaagcgacgccgggtatacaaatcgattatcacctgcaccgctgtactgaaagacaaacagctcattgctggcgaacatatccccattgttccggtattcggcgagtggggcttcgttgaagataaagaagtgtatgagggtgtcgtccgcctgacaaaagacggtcagcgtctgcgcaacatgattatgtcgttcaacgccgacatcgtggcccgcactccgaagaagaagccgttcttctggcctgaacagattgcaggctttgagcatatgtatgacggtaacgacgattacccgtattacctgctcaatcgcacggatgagaacaacggagaaatgccaactcagccgctggcatactatgaaaatccggaagtcccacaggccaatgcctatatgctggaagctgcaaccagtgcagtaaaagaggttgcaactctaggtgttgatgcagaggcggtaaacggtggacaggtagcctacgacactgttaaccagctaaacatgcgtgctgaccttgagacatacgtgtttcaggataatctggctaccgctatgcgccgtgacggtgagatttaccagtcgatagttaatgacatctacgatgttcctcgcaacgtgacaatcacccttgaggatggcagcgaaaaagatgttcagctaatggctgaggttgttgaccttgccactggtgaacggcaggtactgaacgatatcagggggcgctatgagtgctacacggatgttggaccatcattccagtccatgaagcagcaaaaccgctcagaaattcttgagttgctcggcaagacgccgcagggaacgccagaatatcaactgctgttgcttcagtacttcacactgcttgatggcaaaggcgttgagatgatgcgcgattatgccaataagcagcttattcagatgggcgttaagaagccagaaacgcctgaagagcagcaatggttagtagaggcgcaacaagccaaacaaggtcaacaagacccggcaatggttcaggctcagggcgtactcctgcaggggcaggctgaactggctaaagctcagaaccagacgctgtccctgcaaatcgatgcagctaaagtcgaagcgcagaaccagcttaacgctgccagaatcgcagaaatcttcaacaacatggacctcagtaaacaatctgagtttagagagttccttaaaaccgttgcttcattccagcaggaccgcagcgaagatgctcgcgcaaatgctgagttactccttaaaggcgatgaacagacgcacaagcagcgaatggacattgccaacatcctgcaatcgcagagacaaaatcaaccttccggcagtgtagccgagacacctcaataagagagagttaatcatggaaccaaccaccgaaattcaggcaactgaagacttaaccctgtccggcgatcatgcagcggcatctgctgatagcttagttgtcgataatgccaacgacaatgcaggtcaggaagagggctttgagattgtcctgaaggacgatgagacagcaccaaaacaagacccggcaaagaacgcagaattcgcccgccgccgcatcgagcgcaaacgacagcgcgagcttgagcagcagatggaagcagttaaacgcggagaattgccggagagtttacgggtaaaccctgaccttccgcctcagccggacattaacgcctatctgtcagaagaaggcctggccaaatatgactatgacaacagccgtgcgcttgccgctttcaatgctgctaataccgaatggctaatgaaagcgcaggacgcccgcagcaatgccgtagcagaacagggccgcaagactcaggagtttacccagcaatcagcgcaatatgtcgaagctgcccgcaaacattacgacgcggcggaaaagctcaatatccctgactatcaggagaaagaagacgcatttatgcaactggttccgcctgcggttggggccgacattatgcgcctgttcccggagaagtccgccgcgctcatgtatcacctgggggcaaacccggagaaagcccgccagttactggcgatggatgggcagtccgcgctgattgaactaactcgactatccgaacgcttaactctcaagcctcgcggtaaacaaatctcttccgctccccctgctgaccagccgattaccggtgatgtcagcgcagcaaataaagatgccattcgtaaacagatggatgcggctgcgagcaagggagatgtggaaacctaccgcaagctaaaggcaaaacttaaaggaatccgataatggctttgaacgaaggtcaaattgttacactggcggtggatgagattattgaaaccatctccgcaatcactccaatggcgcagaaagccaagaaatacaccccgccagctgcttctatgcagcgctccagcaataccatctggatgcctgtagagcaggagtcccccactcaggagggttgggatttaactgataaagcgacagggttactggagcttaacgtcgcggtaaacatgggagagccggataacgacttcttccagttacgcgcagatgacctgcgagacgagactgcgtatcgtcaccgaatccagtccgcagcccgcaaactggctaacaacgttgagctgaaagtcgcaaacatggccgccgagatggggtcattggttatcacttcgccggacgctatcggcacgaacaccgcagacgcatggaactttgtggccgatgcagaagaaatcatgttctcccgcgaacttaaccgcgacatggggacatcgtacttcttcaacccacaggactacaaaaaggcgggttatgacctgactaagcgtgatatcttcgggcgcatccctgaagaagcataccgcgatggcactatccagcgtcaggttgctggcttcgatgatgtcctgcgctctccgaaacttcctgtgctgaccaaatccaccgcaactggcatcactgtatccggtgcgcagtccttcaagcctgtcgcatggcaactggataacgatggcaacaaagttaacgttgataaccgttttgctaccgtcaccctgtctgcaactaccggcctgaaacgcggcgacaaaatttcgtttgctggcgtgaagttccttggtcagatggctaagaacgtactggcgcaggacgcgactttctccgtagttcgcgttgttgatagtactcacgttgaaatcacgccgaagcctgtagcactggatgatgtttctctttctcctgagcaacgggcatacgccaacgttaacacctcgctggctgatgcgatggcggtgaacatcctgaacgttaaggatgctcgcaccaacgtgttctgggctgatgacgccatccgtattgtgtctcagcctattccggccaaccacgaactgtttgcaggtatgaaaactacctcattcagcatcccggatgtcggccttaacggtatcttcgctacgcagggtgatatttccaccctgtccggcctgtgccgtattgcactgtggtatggcgtgaacgcgacacgtccggaagcaatcggtgttggcctgcctggtcagactgcgtaaccaacaggggcttcggcccctttctttatggagtggctatgaaaatagcaatctataagccaggtggaagcgtcatggtatggggcgtaatggctcagatgaaggtcatcgactccagcgaacttcccgaatatgtcaaagatggctggtttaaccatccttcaaagttgctgtcctcggaatcaggcgatgccaagccgcgcaaaggacgtaagcccaaggcggtaagcgatgcagataaagactaaaggcgatctggtcagggcagcactgcgtaagcttggcgtggcatcagatgcaactctcactgatgttgagccacagtctatgcaggatgccgtagatgacctcgaagcgatgatggccgagtggtatcaggacggaaagggcatcatcaccggctatgtattctcagatgatgataatcctcccgctgaaggtgacgaccacggtcttcgctctagtgcagtcagcgcggtattccacaatctggcttgccggattgccccagattatgcgcttgaggccacagcgaaaattatcgctacggctaaatacgggaaggaacttctctacaagcagaccgccatcgccagagctaaacgagcgccttacccgtcacgtatgccaactggcagtggaaacagtttcgccaatctgaacgaatggcattatttccccggagagcagaatgccgattcaacaactccccatgatgaagggaatgggtaaagacttcaagaatgccgactacattgattacctaccaatcaatatgttggccacaccgaaagaagtcctcaactcatcgggttatttacgctcattccccggcatagcgaagcgcaacgatgtaaatggtgtatcgcgtggcgttgaatacaataccgctcagaacgctgtatatcgcgttttaggcagcaagctctacaaaggggaaaccgtagtcggtgatgtagccggaagcggtcgcgtatcaatggcacatggtcggacatcacaggcggtatgtgttaatggtcaactggtcgagtatcgctatgatggcacggttaaaaccgtctcaaactggcctgcagacagcggattcacgcagtatgagttaggttcagtccgtgacattactcgcttacgtgggcgttatgcatggtcaaaagacggtactgattcatggtttatcactgacctcgaagatgagtcgcatcctgaccggtacagcgcacaatatcgtgcagaatcgcagccagacggcatcattggcatcggttcatggcgtgactttattgtttgcttcggttcgtcaacgatagagtatttctccctgacaggcgcaaccaccgctggcgctgcgttgtatgtcgcacaaccatcgttgatggtacagaaggggattgccggaacatactgtaaaacgccattcgctgattcatatgcattcatcagtcacccggctactggagcaccttccgtctacatcatcgggtcagggcaagcttcaccaattgcgacggccagtattgagaagattatccgctcatacacagctgaagaactggcgactggtgtaatggagactttgcgcttcgattctcatgagcttctgattattcatctccctcgtcatgttctggtttacgacgcatcgtcaagccagaacgggccgcaatggtgcgtactgaaaaccggtttatacgacgatgtttatcgcgccatcgatttcatgtacgaaggcaaccagattacgtgtggcgacaagtcagaagcggtgacggggcagttgcaattcgacatcagtagtcagtacgacaagcagcaagaacacctgttgt

SEQ ID NO: 24 - protein, 637 aa, unidentified
MSFFAGKYTDGKTVLSLNRASGGDINVHYSPNTNSIFHSDMPHMFVKRRFQVGLGNAGNGYFTGALPSDLSYLLANRANVILPVLVVRDNADGTEYYHQMTGIQRNSTYRWRNLYENISIWGQYTGSIQFDLNLEWGYWKQGGAVWDQIGNYGTGGHTIFDHEGGEDYVADAYYDLAGGWIMYQWRDPQDWYMYTNWIPRAQSRPIMNYEDSQNLVNPDYMHPLGPSSSVYDAVYVRAGGARCATGMGDPNAYGNTAYTKVRNLDFPYQIPMANSSSAYLTAGAERHVANARMSGFSEVYYPFTPVRMEYLWLNVTFDNYWGYSAENLFTGNDIKIAKDSFIIKGVDLRNTNYEMLAAVSTGTPSISNTYFSSNVFAWSSTEMDDGGAFRFFGANAWGGLKGFTGSNTGSTVGNSTPWNIGLYRLPQNSNIEINSPQNKIAINGVDIWSPNVRPLHLFTQNKANNIILGDNGRLYPMAYGETRLINTVDVGLGGSPEPSTILLSIEWMGNSLCDTDGDVNMQRIGNNAAGGAGSGPYVGAARRLTKYDYDAGDGVSHQIVVLHTNTFVPILTTNTISYAGGAAGAPRNKFQYYIRKNASNILEFWVTSRALPMSGLPVSYTPWVQYHKLRLNIQRLT

SEQ ID NO: 25 - protein, 637 aa, unidentified
MSFFAGKYTDGKTVLSLNRASGGDINVHYSPNTNSIFHSDMPHMFVKRRFQVGLGNAGNGYFTGALPSDLSYLLANRANVILPVLVVRDNADGTEYYHQMTGIQRNSTYRWRNLYENISIWGQYTGSIQFDLNLEWGYWKQGGAVWDQIGNYGTGGHTIFDHEGGEDYAADAYYDLAGGWIMYQWRDPQDWYMYTNWIPRAQSRPIMNYEDSQNLVNPDYMHPLGPSSSVYDAVYVRAGGARCATGMGDPNAYGNTAYTKVRNLDFPYQIPMANSSSAYLTAGAERHVANARMSGFSEVYYPFTPVRMEYLWLNVTFDNYWGYSAENLFTGNDIKIAKDSFIIKGVDLRNTNYEMLAAVSTGTPSISNTYFSSNVFAWSSTEMDDGGAFRFFGANAWGGLKGFTGSNTGSTVGNSTPWNIGLYRLPQNSNIEINSPQNKIAINGVDIWSPNVRPLHLFTQNKANNIILGDNGRLYPMAYGETRLINTVDVGLGGSPEPSTILLSIEWMGNSLCDTDGDVNMQRIGNNAGSGAGSGPYVGAARRLTKYDYDAGDGVSHQIVVLHTNTFVPILTTNTISYAGGAAGAPRNKFQYYIRKNASNILEFWVTSRALPMSGLPVSYTPWVQYHKLRLNIQRLT

SEQ ID NO: 26 - protein, 637 aa, unidentified
MSFFAGKYTDGKTVLSLNRASGGDINVHYSPNTNSIFHSDMPHMFVKRRFQVGLGNAGNGYFTGALPSDLSYLLANRANVILPVLVVRDNADGTEYYHQMTGIQRNSTYRWRNLYESISIWGQYTGSIQFDLNLEWGYWKQGGAVWDQIGNYGTGGHTIFDHEGGEDYVADAYYDLAGGWIMYQWRDPQDWYMYTNWIPRAQSRPIMNYEDSQNLVNPDYMHPLGPSSSVYDAVYVRAGGARCATGMGDPNAYGNTAYTKVRNLDFPYQIPMANSSSAYLTAGAERHVANARMSGFSEVYYPFTPVRMEYLWLNVTFDNYWGYSAENLFTGNDIKIAKDSFIIKGVDLRNTNYEMLAAVSTGTPSISNTYFSSNVFAWSSTEMDDGGAFRFFGANAWGGLKGFTGSNTGSTVGNSTPWNIGLYRLPQNSNIEINSPQNKIAINGVDIWSPNVRPLHLFTQNKANNIILGDNGRLYPMAYGETRLINTVDVGLGGSPEPSTILLSIEWMGNSLCDTDGDVNMQRIGNNAGSGAGIGPYVGAARRLTKYDYDAGDGVSHQIVVLHTNTFVPILTTNTISYAGGAAGAPRNKFQYYIRKNASNILEFWVTSRALPMSGLPVSYTPWVQYHKLRLNIQRLT

SEQ ID NO: 27 - protein, 637 aa, unidentified
MSFFAGKYTDGKTVLSLNRASGGDVNVHYSPNTNSIFHSDMPHMFVKRRFQVGLGNAGNGYFTGGLPSDLSYLLANRANVIIPVLVVRDNADGTEYYHQMTGIQRNSTYRWRNLYESISIWGQYTGSIQFDLNLEWGYWKQGAAVWDQIGNHGTGGHIIFDHEGGEDYVADAYYDLAGGWIMYQWRDPQDWYMYTNWIPRSQSRPIMNYEDSQNLVNPDYMHPLGPSSSVYDAVYVRAGGARCATGMGDPNSYGNTAYTKYRDLDYPYQIPMANSNSAYMTAGAERHVANGRMSGFSEVYYPFTPVRMEYLWLNVTFDNYWGYSAENLFTGSDIKIAKDSFIIKGVDLRNTNYEMLAAVSTGTPSISNTYFSSNVFAWSSTEMDDGGAFRFFGANAWGGLKGFTGSNTGSTVGNSTPWNIGLYRLPQNSNIEINSPQNKIAINGVDIWSPNVRPLQLFPQNKANNILLGDNGRLFPMAYGETRLINTVDVGLGGSPEPSTILLSIEWMGNSLCDTDGDVNMQRIGNNAASGAGSGPYVGAARRLVKYDYDAGDGVSHQIVVLHTNTFVPILTTNTISYAGGAAGAPRNKFQYYIRKNASNILEFWVTSRALPMSGLPVSYTPWVQYHRLRLNIQRLT

SEQ ID NO: 28 - protein, 684 aa, unidentified
MSSGCGDAMSLNDLQIAKKHQIFEAEVITGKQGGVAGGADIDYATNPVTGQTQKTLPAVLRGAGFSPASFNFTTGGTLGVNDADKAVLWSKEDGGDGNYYAWRGSLPKVIPAASTPLATGGISDSAWDAFGDITFRAEADKKFKYSVKLSDFTTLQQLADAAVDSVLIDRDYNFSNNETVNFGGKTLTIDCKAKFIGDGALIFTNMASGSIIEKPFMESATTPWVIYPWTEDGKWITDAQAVAATLKQSKTEGYQPGVNDWVKFPGLEALIPQNVKDQHVASTLDIRECVGIEVRSAGGLMAAYLFRNCHHCKVIDSDTIIGGKEGIITFENLSGEWGIGNYAIGGRVHYGSGSGVQFLRNNGGASHNGGVIGVTSWRAGESGFKTWQGSVGAGTARNYNLQFRDSVALSPVWDGFDLGSDPGMAPEDDRPGDLPVSRYPMHQLPNNHMVDNILVMNSLGVGLGMDGRGGYVSNVTVQDCAGAGILAYTFNRTFSNITVIDCNYMNFDSDQIIIIGDCIVNGIRAAGIKPQPSKGMVISAPNSTLSGVVGNVPSDRILAGNIIDSALGQTRINGFNGDSVEMGLRVHKLTKTLDSGAIRSTLNGGPGSGSAWTEITAISGSLPDAVSLKINRGDYHAVEIPVAVTVLPDAAVRDNGSIALYLEGDSLKALVKRANGSYTRLTLA

SEQ ID NO: 29 - protein, 684 aa, unidentified
MSSGCGGVMSLNDLQIAKKHQIFEAEVITGKQGGVAGGADIDYATNPVTGQTQKTLPAVLRGAGFSPASFNFTTGGTLGVNDADKAVLWPKEDGGDGNYYAWRGSLPKVIPAASTPLATGGISDSAWDAFGDITFRAEADKKFKYSVKLSDFTTLQQLADAAVDSVLIDRDYAFANGETVNFGGKTITIDCKAKFIGDGALIFTNMGSGSIIEKPFMESATTPWVIYPWTEDGKWITDAQAVAATLKQSKTEGYQPGVNDWVKFPGLEALIPQNVKDQHVASTLDIRECVGIEVRSAGGLMAAYLFRNCHHCKVIDSDTIIGGKEGIITFENLSGEWGIGNYAIGGRVHYGSGSGVQFLRNNGGASHNGGVIGVTSWRAGESGFKTWQGSVGAGTARNYNLQFRDSVALSPVWDGFDLGSDPGMAPEDDRPGDLPVSQYPMHQLPNNHMVDNILVMNSLGVGLGMDGRDGYVSNVTVQDCAGAGMLAYTFNRTFSNITVIDCNYMNFDSDQIIIIGDCIVNGIRAAGIKPQPSKGMVISAPNSTLSGVVGNVPPDRILAGNIIDSALGQTRINGFNGDSVEMGLRVHKLTKTLDSGAIRSTLNGGPGSGSAWTEITAISGSLPDAVSLKINRGDYHAVEIPVAVTVLPDAAVRDNGSIALYLEGDSLKALVKRADGSYTRLTLA

SEQ ID NO: 30 - protein, 684 aa, unidentified
MSSGCGGVMSLNDLQIAKKHQIFEAEVITGKQGGVAGGADIDYATNQVTGQTQKTLPAVLRGAGFSPASFNFTTGGTLGVNDADKAVLWPKEDGGDGNYYAWRGSLPKVIPAASTPLATGGISDSAWDAFGDITFRAEADKKFKYSVKLSDFTTLQQLADAAVDSVLIDRDYAFTNGETVNFGGKTITIDCKAKFIGDGALIFTNMGSGSIIEKPFMESATTPWVIYPWTEDGKWITDAQAVAATLKQSKTEGYQPGVNDWVKFPGLEALIPQNVKDQHVASTLDIRECVGIEVRSAGGLMAAYLFRNCHHCKVIDSDTIIGGKEGIITFENLSGEWGIGNYAIGGRVHYGSGSGVQFLRNNGGASHNGGVIGVTSWRAGESGFKTWQGSVGAGTARNYNLQFRDSVALSPVWDGFDLGSDPGMAPEDDRPGDLPVSQYPMHQLPNNHMVDNILVMNSLGVGLGMDGRDGYVSNVTVQDCAGAGMLAHTFNRTFSNITVIDCNYMNFDSDQIIIIGDCIVNGIRAAGIKPQPSKGMVISAPNSTLSGVVGNVPPDRILAGNIIDSALGQTRINGFNGDSVEMGLRVHKLTKTLDSGAIRSTLNGGPGSGSAWTEITAISGSLPDAVSLKINRGDYHAVEIPVAVTVLPDAAVRDNGSIALYLEGDSLKALVKRADGSYTRLTLA

SEQ ID NO: 31 - protein, 684 aa, unidentified
MSSGCGEVMSLNDLQIAKKHQIFEAEVITGKQGGVAGGADIDYATNPVTGQTQKTLPAVLRGAGFSPASFNFTTGGTLGVNDADKAVLWSKEDGGDGNYYAWRGSLPKVIPAASTPLATGGISDSAWDAFGDITFRAEADKKFKYSVKLSDFTTLQQLADAAVDSVLIDRDYTFTNGETVNFGGKVLTIDCKAKFIGDGALIFTNMASGSIIEKPFMESATTPWVIYPWTEDGKWITDAQAVAATLKQSKTEGYQPGVNDWVKFPGLEALIPQNVKDQHVASTLDIRECVGIEVRSAGGLMAAYLFRNCHHCKVIDSDTIIGGKEGIITFENLSGEWGIGNYAIGGRVHYGSGSGVQFLRNNGGASHNGGVIGVTSWRAGESGFKTWQGSVGAGTARNYNLQFRDSVALSPVWDGFDLGSDPGMAPEDDRPGDLPVSQYPMHQLPNNHMVDNILVMNSLGVGLGMDGRDGYVSNVTVQDCAGAGILAHTFNRTFSNITVIDCNYMNFDSDQIIIIGDCIVNGIRAAGIKPQPSKGMVISAPNSTLSGVVGNVPPDRILAGNIIDSALGQTRINGFNGDSVEMGLRVHKLTKTLDSGAIRSTLNGGPGSGSAWTEITAISGSLPDAVSLKINRGDYHAVEIPVAVTVLPDAAVRDNGSIALYLEGDSLKALVKRANGSYTRLTLA

SEQ ID NO: 32 - protein, 684 aa, unidentified
MSSGCGDVMSLNDLQVAKKHQIFEAEVITGKQGGVAGGADIDYATNPVTGQTQKTLPAVLRDAGFSPASFNFTTGGTLGANDADKAVLWPKEDGGDGNYYAWRGSLPKVIPAASTPLATGGISDFAWDAFGDITFRAEADKKFKYSVKLSDFTTLQQLADAAVDSVLIDRDYTFTNGETVNFGGKVLTIDCKAKFIGDGALIFTNMGSGSIIEKPFMESATTPWVIYPWTEDGKWITDAQAVAATLKQSKTEGYQPGVNDWVKFPGLEALIPQNVKDQHVASTLDIRECVGIEVRSAGGLMAAYLFRNCHHCKVIDSDTIIGGKEGIITFENLSGEWGIGNYAIGGRVHYGSGSGVQFLRNNGGASHNGGVIGVTSWRAGESGFKTWQGSVGAGTARNYNLQFRDSVALSPVWDGFDLGSDPGMAPEDDRPGDLPVSQYPMHQLPNNHMVDNILVMNSLGVGLGMDGRDGYVSNVTVQDCAGAGMLAHTFNRTFSNITVIDCNYMNFDSDQIIIIGDCIVNGIRAAGIKPQPSKGMVISAPNSTLSGVVGNVPPDRILAGNIIDSALGQTRINGFNGDSVEMGLRVHKLTKTLDSGAIRSTLNGGPGSGSAWTEITAISGSLPDAVSLKINRGDYHAVEIPVAVTVLPDAAVRDNGSIALYLEGDSLKALVKRANGSYTRLTLA

SEQ ID NO: 33 - protein, 684 aa, unidentified
MSSGCGEVMSLNDLQIAKKHQIFEAEVITGKQGGVAGGADIDYATNPVTGQTQKTLPAVLRGAGFSPASFNFTTGGTLGVNDADKAVLWSKEDGGDGNYYAWRGSLPKVIPAASTPLATGGISDSAWDAFGDITFRAEADKKFKYSVKLSDFTTLQQLADAAVDSVLIDRDYTFTNGETVNFGGKVLTIDCKAKFIGDGALIFTNMASGSIIEKPFMESATTPWVIYPWTEDGKWITDAQAVAATLKQSKTEGYQPGVNDWVKFPGLEALIPQNVKDQHVASTLDIRECVGIEVRSAGGLMAAYLFRNCHHCKVIDSDTIIGGKEGIITFENLSGEWGIGNYAIGGRVHYGSGSGVQFLRNNGGASHNGGVIGVTSWRAGESGFKTWQGSVGAGTARNYNLQFRDSVALSPVWDGFDLGSDPGMAPEDDRPGDLPVSQYPMHQLPNNHMVDNILVMNSLGVGLGMDGRDGYVSNVTVQDCAGAGMLAYTFNRTFSNITVIDCNYMNFDSDQIIIIGDCIVNGIRAAGIKPQPSKGMVISAPNSTLSGVVGNVPIDRILAGNIIDSALGQTRINGFNGDSVEMGLRVHKLTKTLDSGAIRSTLNGGPGSGSAWTEVTAISGSLPDAVSLKINRGDYHAVEIPVAVTVLPDAAVIDNGSIALYLEGDSLKALVKRANGSYTRLTLA

SEQ ID NO: 34 - protein, 684 aa, unidentified
MSSGCGDVMSLNDLQVAKKHQIFEAEVITGKQGGVAGGADIDYATNPVTGQTQKTLPAVLRDAGFSPASFNFTTGGTLGANDADKAVLWPKEDGGDGNYYAWRGSLPKVIPAASTPLATGGISDFAWDAFGDITFRAEADKKFKYSVKLSDFTTLQQLADAAVDSVLIDRDYTFTNGETVNFGGKVLTIDCKAKFIGDGALIFTNMGSGSIIEKPFMESATTPWVIYPWTEDGKWITDAQAVAATLKQSKTEGYQPGVNDWVKFPGLEALIPQNVKDQHVASTLDIRECVGIEVRSAGGLMAAYLFRNCHHCKVIDSDTIIGGKEGIITFENLSGEWGIGNYAIGGRVHYGSGSGVQFLRNNGGASHNGGVIGVTSWRAGESGFKTWQGSVGAGTARNYNLQFRDSVALSPVWDGFDLGSDPGMVPEDDRPGDLPVSQYPMHQLPNNHMVDNILVMNSLGVGLGMDGRDGYVSNVTVQDCAGAGMLAHTFNRTFSNITVIDCNYMNFDSDQIIIIGDCIVNGIRAAGIKPQPSKGMVISAPNSTLSGVVGNVPPDRILAGNIIDSALGQTRINGFNGDSVEMGLRVHKLTKTLDSGAIRSTLNGGPGSGSAWTEITAISGSLPDAVSLKINRGDYHAVEIPVAVTVLPDAAVRDNGSIALYLEGDSLKALVKRANGSYTRLTLA

SEQ ID NO: 35 - protein, 684 aa, unidentified
MSSGCGDVLSLNDLQVAKKHQIFEAEVITGKQGGVAGGADIDYATNQVTGQTQKTLPAVLRDAGFSPASFNFTTGGTLGVNDADKAVLWPKEDGGDGNYYAWRGSLPKVIPAASTPLATGGISDSAWDAFGDITFRAEADKKFKYSVKLSDFTTLQQLADAAVDSVLIDRDYTFTNGETVNFGGKVLTIDCKAKFIGDGALIFTNMASGSIIEKPFMESATTPWVIYPWTEDGKWITDAQAVAATLKQSKTEGYQPGVNDWVKFPGLEALIPQNVKDQHVASTLDIRECVGIEVRSAGGLMAAYLFRNCHHCKVIDSDTIIGGKEGIITFENLSGEWGIGNYAIGGRVHYGSGSGVQFLRNNGGASHNGGVIGVTSWRAGESGFKTWQGSVGAGTARNYNLQFRDSVALSPVWDGFDLGSDPGMAPEDDRPGDLPVSQYPMHQLPNNHMVDNILVMNSLGVGLGMDGRDGYVSNVTVQDCAGAGMLAYTFNRTFSNITVIDCNYMNFDSDQIIIIGDCIVNGIRAAGIKPQPSKGMVISAPNSTLSGVVGNVPIDRILAGNIIDSALGQTRINGFNGDSVEMGLRVHKLTKTLDSGAIRSTLNGGPGSGSAWTEVTAISGSLPDAVSLKINRGDYHAVEIPVAVTVLPDAAVIDNGSIALYLEGDSLKALVKRANGSYTRLTLA

SEQ ID NO: 36 - protein, 684 aa, unidentified
MSSGCGDVLSLNDLQVAKKHQIFEAEVITGKQGGVAGGADIDYATNQVTGQTQKTLPAVLRDAGFSPASFNFTTGGTLGINDANKAVLWPKEDGGDGNYYAWRGSLPKVIPAASTPLTTGGISDSAWDAFGDITFRAEADKKFKYSVKLSDFTTLQQLADAAVDSVLIDRDYTFTNGETVNFGGKVLTIDCKAKFIGDGALIFTNMASGSIIEKPFMESATTPWVIYPWTEDGKWITDAQAVAATLKQSKTEGYQPGVNDWVKFPGLEALIPQNVKDQHIASTLDIRECVGIEVRSAGGLMAAYLFRNCHHCKVIDSDTIIGGKEGIITFENLSGEWGIGNYAIGGRVHYGSGSGVQFLRNNGGASHNGGVIGVTSWRAGESGFKTWQGSVGAGTARNYNLQFRDSVALSPVWDGFDLGSDPGMAPEDDRPGDLPVSQYPMHQLPNNHMVDNILVMNSLGVGLGMDGRDGYVSNVTVQDCAGAGMLAHTFNRTFSNITVIDCNYMNFDSDQIIIIGDCIVNGIRAAGIKPQPSKGMVISAPNSTLSGVVGNVPIDRILAGNIIDSALGQTRINGFNGDSVEMGLRVHKLTKTLDSGAIRSTLNGGPGSGSAWTEITAISGSLPDAVSLKINRGDYHAVEIPVAVTVLPDAAVRDNGSISLYLDGDSLKALVKRADGSYTRLTLA

SEQ ID NO: 37 - protein, 684 aa, unidentified
MSSGCGDVLSLNDLQVAKKHQIFEAEVITGKQGGVAGGADIDYATNQVTGQTQKTLPAVLRDAGFSPASFNFTTGGTLGINDANKAVLWPKEDGGDGNYYAWRGSLPKVIPAASTPLTTGGISDSAWVAFGDITFRAEADKKFKYSVKLSDFTTLQQLADAAVDSVLIDRDYTFTNGETVNFGGKVLTIDCKAKFIGDGALIFTNMASGSIIEKPFMESATTPWVIYPWTEDGKWITDAQAVAATLKQSKTEGYQPGVNDWVKFPGLEALIPQNVKDQHVASTLDIRECVGIEVRSAGGLMAAYLFRNCHHCKVIDSDTIIGGKDGIITFENLSGEWGIGNYAIGGRVHYGSGSGVQFLRNNGGASHNGGVIGVTSWRAGESGFKTWQGSVGAGTARNYNLQFRDSVALSPVWDGFDLGSDPGMAPEDDRPGDLPVSQYPMHQLPNNHMVDNILVMNSLGVGLGMDGRDGYVSNVTVQDCAGAGMLAHTFNRTFSNITVIDCNYMNFDSDQIIIIGDCIVNGIRAAGIKPQPSKGMVISAPNSTLSGVVGNVPIDRILAGNIIDSALGQTRINGFNGDSVEMGLRVHKLTKTLDSGAIRSTLNGGPGSGSAWTEITAISGSLPDAVSLKINRGDYHAVEIPVAVTVLPDAAVRDNGSISLYLDGDSLKALVKRADGSYTRLTLA

SEQ ID NO: 38 - protein, 684 aa, unidentified
MSSGCGDVLSLNDLQVAKKHQIFEAEVITGKQGGVAGGADIDYATNQVTGQTQKTLPAVLRDAGFSPASFNFTTGGTLGINDANKAVLWPKEDGGDGNYYAWRGSLPKVIPAASTPLTTGGISDSAWVAFGDITFRAEADKKFKYSVKLSDFTTLQQLADAAVDSVLIDRDYTFTNGETVNFGGKVLTIDCKAKFIGDGALIFTNMASGSIIEKPFMESATTPWVIYPWTEDGKWITDAQAVAATLKQSKTEGYQPGVNDWVKFPGLEALIPQNVKDQHVASTLDIRECVGIEVRSAGGLMAAYLFRNCHHCKVIDSDTIIGGKEGIITFENLSGEWGIGNYAIGGRVHYGSGSGVQFLRNNGGASHNGGVIGVTSWRAGESGFKTWQGSVGAGTARNYNLQFRDSVALSPVWDGFDLGSDPGMAPEDDRPGDLPVSQYPMHQLPNNHMVDNILVMNSLGVGLGMDGRDGYVSNVTVQDCAGAGMLAHTFNRTFSNITVIDCNYMNFDSDQIIIIGDCIVNGIRAAGIKPQPSKGMVISAPNSTLSGVVGNVPIDRILAGNIIDSALGQTRINGFNGDSVEMGLRVHKLTKTLDSGAIRSTLNGSPGSGSAWTEITAISGSLPDAVSLKINRGDYHAVEIPVAVTVLPDAAVRDNGSISLYLDGDSLKALVKRADGSYTRLTLA

SEQ ID NO: 39 - protein, 684 aa, unidentified
MSSGCGDVITLNDLQIAKKHQLFEAEVITGKAGGVAGGADIDYATNQVTLQTQKTLPAVLRDAGFSPASFNFTTGGTLGVNDADKAVLWPIEDGGDGNYYAWRGSLPKVIPASSTPLTTGGISDSAWVAFGDITFRAEADKKFKYSVKLSDFTTLQQLADAAVDSVLIDRDYAFTNGETVNFGGKTITIDCKAKFIGDGALIFTNMGSGSIIEKPFMESATTPWVIYPWTEDGKWITDAQAVAATLKQSKTEGYQPGVNDWVKFPGLEALIPQNVKDQHVASTLDIRECVGIEVRSAGGLMAAYLFRNCHHCKVIDSDTIIGGKEGIITFENLSGEWGIGNYAIGGRVHYGSGSGVQFLRNNGGASHNGGVIGVTSWRAGESGFKTWQGSVGAGTARNYNLQFRDSVALSPVWDGFDLGSDPGMAPEDDRPGDLPVSQYPMHQLPNNHMVDNILVMNSLGVGLGMDGRDGYVSNVTVQDCAGAGMLAHTFNRTFSNITVIDCNYMNFDSDQIIIIGDCIVNGIRAAGIKPQPSKGMVISAPNSTLSGVVGNVPPDRILAGNIIDSALGQTRINGFNGDSVEMGLRVHKLTKTLDSGAIRSTLNGGPGSGSAWTEITAISGSLPDAVSLKINRGDYHAVEIPVAVTVLPDAAVRDNGSIALYLEGDSLKALVKRADGSYTRLTLA

SEQ ID NO: 40 - protein, 684 aa, unidentified
MSSGCGDVITLNDLQIAKKHQLFEAEVITGKAGGVAGGADIDYATNQVTLQTQKTLPAVLRDAGFSPASFNFTTGGTLGVNDADKAVLWPIEDGGDGNYYAWRGSLPKVIPASSTPLTTGGISDSAWVAFGDITFRAEADKKFKYSVKLSDFTTLQQLADAAVDSVLIDRDYTFTNGETVNFGGKVLTIDCKAKFIGDGALIFTNMGSGSIIEKPFMESATTPWVIYPWTEDGKWITDAQAVAATLKQSKTEGYQPGVNDWVKFPGLEALIPQNVKDQHVASTLDIRECVGIEVRSAGGLMAAYLFRNCHHCKVIDSDTIIGGKEGIITFENLSGEWGIGNYAIGGRVHYGSGSGVQFLRNNGGASHNGGVIGVTSWRAGESGFKTWQGSVGAGTARNYNLQFRDSVALSPVWDGFDLGSDPGMAPEDDRPGDLPVSQYPMHQLPNNHMVDNILVMNSLGVGLGMDGRDGYVSNVTVQDCAGAGMLAYTFNRTFSNITVIDCNYMNFDSDQIIITGDCIVNGIRAAGIKPQPSKGMVISAPNSTLSGVVGNVPPDRILAGNIIDSALGQTRINGFNGDSVEMGLRVHKLTKTLDSGAIRSTLNGGPGSGSAWTEITAISGSLPDAVSLKINRGDYHAVEIPVAVTVLPDAAVRDNGSIALYLEGDSLKALVKRANGSYTRLTLA

SEQ ID NO: 41 - protein, 684 aa, unidentified
MSSGCGDVLSLNDLQVAKKHQIFEAEVITGKQGGVAGGADIDYATNQVTGQTQKTLPAVLRDAGFSPASFNFTTGGTLGADDADKAVLWPIEDGGDGNYYVWRGSLPKVIPAASTPLTTGGISDSAWVAFGDITFRAEADKKFKYSVKLSDFTTLQQLADAAVDSVLIDRDYTFTNGETVNFRGKVLTIDCKAKFIGDGALIFTNMASGSIIEKPFMESATTPWVIYPWTEDGKWITDAQAVAATLKQSKTEGYQPGVNDWVKFPGLEALIPQNVKDQHVASTLDIRECVGIEVRSAGGLMAAYLFRNCHHCKVIDSDTIIGGKEGIITFENLSGEWGIGNYAIGGRVHYGSGSGVQFLRNNGGASHNGGVIGVTSWRAGESGFKTWQGSVGAGTARNYNLQFRDSVALSPVWDGFDLGSDPGMAPEDDRPGDLPVSQYPMHQLPNNHMVDNILVMNSLGVGLGMDGRDGYVSNVTVQDCAGAGILAHTFNRTFSNITAIDCNYMNFDSDQIIIIGDCIVNGIRAAGIKPQPSKGMVISAPNSTLSGVVGNVPPDRILAGNIIDSALGQTRINGFNGDSVEMGLRVHKLTKTLDSGAIRSTLNGGPGSGSAWTEITAISGSLPDAVSLKINRGDYHAVEIPVAVTVLPDAAVRDNGSIALYLEGDSLKALVKRANGSYTRLTLA